United States Patent Application Publication US 2024/0271113 A1 - sequence listing, part 2

SEQ ID NO: 1457 - protein, 1462 aa, unidentified
  REGION 1..1462: note = Cas Enzyme sequence
MDIPPTQRAYTLRLSGDDQGRWREALWQTHEAVNRGAKVFGDWLLTLRGGLSHTLADAPTPEQRRDRRIVLALSWISVESERGAPAQKYRVATGEAIKALQEILRERGVVSDDIANWVRDCEASLGAAIREDAVWVNRSKIFDEFSTQLNISCQEAQEVWFQFFGPTDKYFQLPSISAGEEERPVTASTTTFDTKFATIARGWLSSNWGAGKKTDKARLNANLQRLATEPLARFEGKGGRELIDHLADVFGLPRGTSPLELTRAIGWTTGRDSRTKLALKAIASAEILSRDALENLQRKTQQEFGEKGSSERAVASWTAALRRHLEQQIGISYRIERDLIGEFANMLDHAARRVGMATSWVKRSEATRQRFNEDARKMGRVPADAQAWLNGYCDDRSAASGSVEGYRIRRRAVGRWKDVVQAWSAADCLTDEDRVTAARALQDAESDEKFGDIQLFEALAAEGAECVWKQDGRAAPEVLLDYVASANAQADQLRFKVPAYRHPDPLLHPVFCEFGKSRWTVRFAVHQRRGKHDRKGEDLRDVSIGLWDGSAVSTLALRWHSKRLVKDLALYAADSGGQEVTRADRLGRAAAALRSPNPACISSVFEEEEWNARLQVPRQQLDAMARVRDNLRLPNLEQERRLIAMRSRLPWLLTFSPRLQPQGPWLRYLQDQSLIASDAKLQVSPKGERDEWRGLAYPFWHPMNEKGRVGMAKHLLSRLPGLRILSVDLGHRFAAACAVWQTLSRDEMLAACAAANAPAPSPDTLWMRLKDARGKHPTIYHRIGPDTLDGRAHFAPWARLDRQFAIKLQGEERPARHASLGEIEAVVQLEKALGFARSDDLPKRIDELMAHAVRVTRLGLRRHGDRARIAFALTADHKPISGDRKEWFAKQPDDTEERARERHQNRIRFMQDALLLWYELATSTRWDDAAAREPWNQQILPLIKATPAPACPTGNKEDARCESWERLQRELPRRVEEDVEITVQERKARKAERELVRELLGPVAERLISTPDLTSMLNALWAARWHQDDGTPARVSHQGKETRVEAQATGWHARLRWLNRMLLPRNSDRRTRKIQDVGGLSLTRIATIRSLYQVQKAFFTRLHPVGRREVAREAFGDDILQKMERMRENRVKQLASRIVEAALGVGKEVPCKGGRQPKRPVEIDTESRFASCHAVVIENLSNYRPDDLRTRLENRQLMDWSAAQVKQCLAEACQLHGLHLRYVSAHFTSRQDSRTGAPGMRCAEVEAGEFLNARFWKSEVARARKRLNETNASAPKHRAYDSYLDDLERHWRSNSSIPMKVLIPRPGGELFVSVQDDSPAANGLDADLNAAANIGLRALLDPDWEGRWWYVPCDAGTSIPDKNRVAGSVVFETLVPLRASQPVAQSAAPRKRTRKQPAERGVVNLFRDISAQPLNAESGLKTYRDYWADVEGRVIQRLRAMNGVSPQTASAAAVAGSDDVPF

SEQ ID NO: 1458 - protein, 1462 aa, unidentified
  REGION 1..1462: note = Cas Enzyme sequence
MATKSYKLQLDLRPWADKPVDEDRFTTRLEEISSTRRWLDDTREAFNVGVDYLTRWLLRMHRGAGVFREKKDGIWRDWDDISTLEQLIDARNRLQVELGSFALIENRELLDVFKAKGKSDVEAVELAECCRRISKELCPPTEDANGTQMPRDDLDLLTLSTSTAKGIRERGVSKSGELKEKSGRRPQWMLKQAISELLRYAPSWEALKEAAAKTPQFLSAESDGKKLIATWGAKHERYAAESGDRAWELTRASLKDYCESWKDEKGKTEARKAASATSGGIAAYRKLLQADCLPIPGFERPAEHLQLKGALAEWNYAMWNMSGQRIRSHLGWVHRRTNERVVWESKTRLFEQGGWARVKHDGKPIKKEVLTSKDIRFLAPPEQEKEDFKQQPAYGQRKWVKALREYESVEMPKHLRGIAYGAAEEPRVRKRTAKGWVKVRDKWFDLIDRAKKAGTSAPSAGDLIAALNEMRAREARDFGDQRLFEWLAAPERRWLWDGTNDVANNDCGRDDRDCVSAFVTQNEHLADRPESITFTRTDPVQHPVWPFFGENSAVEYWLRRQKTCNGQGRIVLILKQVLCRQAEGSYTSKDKVRIALRGYEDFESSFTLPEKDEDVSAKQELIFRDDLLGDETRPGTLSGMKLTWDRDELEAANRKRRAATRAPRIYANFSCDAGTGNLPEWLTKKLGYIDRKNPRDGMAGFFKLSSAIRFDGARRKSGSEDTAKPGSLRSPGSWVWPKEAIDKGFAVRGTDLGYRTSSAGAWWRLSFEQPQYGVGWLAGVCEGKPVFAVLERTGRVLLPGDGEPLPAAEQALRDRLYSVRTRLNLNNTLLRIVRLLTLDSITSRVKTGMRFRRRSDGTSKPVGILWKSELKTLNVDEIKENCRKAAEQLLRSAETDAMGESQRAIHHDGSVWDWLVSHDKSLKPLRDLLPKTPIPTETDAKNQNLDRDALKTERDKEDADFAAAVYELRCPLAMALCSGYDAKKGRRVGSGLWAEFDRALARELSYREGGGRIVEDGLLRLVRKPPITKHRDRKDDANNLPHGKTHRGGLSMARLNFLEDVKNFVRRWSCRPRWPGDVRRVPEDAKFDRCDTEHIDNLREHRAKLISHSDVAQTLGFEQDLRRGLWLFKAPSGELFWHRPERGHFYRREREELVQCATPAGVSEENTRHPHPAFDKAHVLVYEDLTRYRMSSDRPKNENAGLARWSHRRILEFSLHVGNLFGVPITTVDARFSSRFCSHCGAPGCRASRFDPNWLSTRWMQRVRVSADIRDANLKKIACEMEERLRTDRHAYDLEKSRPWVLRDGGTHFACANRSCVLHALPVNADENAAANIGLRFLRGFEGIRVTINDAGAVTKPVGHISPGTVLKSDHSDSVSFWVALTDEDGLSRKKSARGQSASMAENLQDREEETGGERYLFRDPSGRFLRAERWYSGKDFWAHVAAACANGIRVANANLNSAPSE

SEQ ID NO: 1459 - protein, 1462 aa, unidentified
  REGION 1..1462: note = Cas Enzyme sequence
MAKQMPDTQRAYTLRLRGLDPQDQSWRDALWRTHEAVNKGAKAFGDWLLTLRGGLDHALADAKVEGGKGKPDRDPTDEERKGRRILLALSWLSVESEKGAPEKYVVPHDLDKESGMRSNWKTVDALREILKGRGLDEREIESWVQDCSASLSATIRDDAVWVNRSKAFDEAVKSIGSSLTRDEVWDMLQPFFGSREAYLAPAEPPEEVSADVRQEDKAKDLVQKAGQWLSSRFGTGKGANFRRMATIYEKIANWAGKARSGMSGDKAIADLATALSEFSPASNDLQGVLGLISGPGHKSATRNLLNGFPTKTSVTQGDFQNLQDKARQDAQKCKNKTGSKGQRDYADAVLRYVESACGFTYLQNSGSARHSEFAVMLDHAARRVSLVHTSIKRAEAERRRFEEDAKRMANVPGPAKKWLDSYCRERSRPSGALDRYRIRRRAVDGWKEVVAAWSKADCKTAEDRIAAARALQDDPEIQKFGDIQLFEALADDDALCVWHKDGDSAKAADPQPLIDYVLATDAEFKKRDFKVPAYRHPDALLHPVFCDFGCSRWDIEFAVHEARRKTRRKHKPIPTDDPHALSMTLWTGSTFKSQKLRWQSKRLTHDLALGQVKQDDGAAEVVARADRLGRAAADVGASATVRIAGIFEQKDWNGRLQAPRAQLNAIAARVTRHGWDDKAKQMRDRLRWLIAFSARLQPSGPWVKYAEAFPDDAPAKPFVSRKGDYAVRHQDNDARKGHAKLILSRLPGLRLLSVDLGHRYAAACAVWETLAKEVFEKERHDAEAKGAHVVLGPEGCKPEEAIYAHFVWPEKESNAATKKARQEGREKFHPVTVYRRIGPDELVDTSNGEVKEHPAPWARLDRQFLIKLQGEDHEARKASPAEVEAVQELERAVGREPPDQRSLRVDDLMSKTVHTVRLALQRHRRRASIAFNLTAAKRLLPGGREEDLDEEGRVELLADRLSDWYTLFKGKGWNDEWAKEQWETHIAPLLQGAALPQISEDAEATPKARKKYRADLTEQLKPAAESLARNPSLCKKLHCLWATRWRDDDGALRKRLRWLRDWILPRGKNARRDPAIRHVGGLSLTRIATIKALYQVQKAFRMRPEPDDLRKNIPAKGDDALRDFGRSVLDVMEHMREQRVKQLASRIAEAALGVGRVKRFAGGKDPKRPRERVDPRCHAIVIEDLTHYRPEETRTKRENRQLMTWSSSKVRKYLAEACQLYGLRLSEVNARYTSRQDSRTGAPGIRCQDVPVQKFMQSPSWRSEVAHAEKKHAEGKADARERFLCDLNAKWKGREAEWEKAGTVRIPLNGGEIFVSAGPCKCCERNDRNGPAGLQADLNAAANIGLKALTDPDWPGKWWYVPCDPKTFKPVKDKVAGSAAIRLDKPLKDLPAAQGTDGARKKPSKTKAQPREVVNLWRDVSSQPISANDDWREYKPYWDHVQERVVKILRQWAGLTPNYKNQ

SEQ ID NO: 1460 - protein, 1463 aa, unidentified
  REGION 1..1463: note = Cas Enzyme sequence
MNRIYQGKVSDAELLPLRLERGEGRGEVSNSNLIAPPPQGWDWASALWDHHALFQDAVNYYVICLLALAQPGNDVYPIREKLDAADVEGQPDELMVWRPFRRRGATRRGLRDSVAKYFTPGNHQPTPEECFAAVLAGNECTQSEEGLQRLDAGLKQLLDKCTGAAGCKQAAPVFLPRFCKPAYQGSYGEDSTTLARENAAARLPFVLHDTNTRPDSPALDEFDAHSIALPNEKKPQFRGDDAKKKLREMIAEWRKRQPDSEKDWARLEDAVSKLPENVEIPGYAATSAKNEVKFRLFAMFFFRHVEKSAFTLNLLRVMTPKPAAGDTIPAKASLDTGGDPIRAARGKRGYVFRAFTSLACWGGDDSGTPQWIEFDFAAFEEALKALHQVDAKAEERTKARELKQVQHDYQRGKTKKWKGDGAGEDEQRLPILAGDPRIARLEHLVDEELKDEYEMSEGVSVKYGLHQRTTHGFRDVRKKWNEALKPGDEYSLARREKLWNLLTDYKKENAQMMGSPAIFDAMVEEKNWIIWREATAERLAEWRAAAKLPEDAEFAKDPLQALTDERELIEEIARLEGPIRFTAADPEHSRRQFYFSDVSALDKKGRLRHDRQTVDVEIAVRTADGRWQRTDARLHFSAPRLLRDQLNNTSGKDAAFQQAMMNALGLSAGLKKTEKGKVREASFAECAAVALMPEITANGERRILLNFPLKLEDDAIALQLGKAARWDVMQFGGADQESYWLRWPTTWHDEKKERKKALPAPWWKDLRPFRCLSADLGQRDTAAFAIIQASPGSAPKPQSRRLGEAVGTTWWATVRATGMLRLPGEDAFVQRERTRLDKDEPHPTKGFEELSGERGRLATNDEWLEAQDICAKLGLNADKILGEEPKAHSFPELNDQLLFALRRAQSRLARLQSWSCIESNAKRKEAIAKQLKEAVKELSEAKDDSERDALLMKLRPLVEREDWRLVAARLIQEVERMRALLPRELERIADRIQPLRGRRWEWVLRDGANHVLRQTERGTDDRKKLLAGQRGLSIERIEQLESLRQRCQSLNRALRQEPGKPANLGKSKRGIELPDPCPELLDRLDALKEQRVNQTAHLILAQALGVRLRAHQTDEATRTAQDMHGEYERIPGREPVDFIVLENLDRYLASQGRSRGENSRLMKWCHRQILGKLKQLCEPYGLRVLETPAAYSSRFCSLTGVAGFRAVELRPENAKDFRWKKHLDRLRDEAEGKRKLSKDEREESLRVKELFDLLNTINADLLAAKPERPKWRTLLAPVAGGPIFIPASTTERYERENSKTGKMEPAIRFAEVNGRRPVVAQSDINAAINLGLRALAAPETADIHLRIRAARDGETFAVRAENLREKARWGAKPPKISVPKEDDRRKLLTDARLSFFADVGGVAEYDLAKIDGKTGFASGRGIWGTIKGNEKHVGKDWLRCQEINAARVARWKSKREPDDEVPM

SEQ ID NO: 1461 - protein, 1465 aa, unidentified
  REGION 1..1465: note = Cas Enzyme sequence
MSENLFSHFTQQYSLIKTLRFSLIPILTEKQEKDIFYQKGYKNRDQIQRQDKIEKFFNENKQDVFEVDIERKKRYRALKYYLTELHKLFIKDALGKAKVNDSLNFSSLFEKYKDFEKEKDDNKKSQLAKGINEEKARLVKFFGNKDGKGGLFQKTAEDYYDWLKDNLNENEKIQDNKDEKQKKNNILLSQNVLLILAKKIKNDNIKEKVKNDKDGNNLYALNNIEYLKKEELRKGTLTEYFQGWSTYFKNFNEIRGNLYKDDGRKVDEGDIENDIKIRKANAGQITTRILDENFEIFVMNSIWAETNKKNLKTEDFQNKDIEDGISIFTPEFYVHCLLQTDINTYNAKIVELNKFFNENKKPNSDIKYLKTLQKQLLLTDKPDGEEDYFVYEILDDDELIKGLEEFSTLSREKIKGIKTFLQGKIEYNLEDIQLNENQLHYFCNKYFGSWSYIRDLYYQQNNIVDEDQAKKDSEFKDKEGISKVAISLLEIKELLNKETVENFIETIKNGWFCRDYKYPSKTNIDLLKNAGVYKEESGNFENFLSFLKFELDSLLNGRAFLTKREQEDKEKIKATKQSLKNSQKERERVDELLLNKFSEENFTQDIADSFEKKQEKFESAFTDLKKAIENKQKLQRAKDFECKKAINEYCTRISDINRYFALFSVPEGVTSGFLNTVVTEFKEDNQIVPLFNAIRNYITKRPEETEKVKLNFDYNNLLDGWGYKNSDHPASSDYHCRLFRKNDSIFLGIVGDAENNLIDSSYELMDYYQIKGQTIFGSTYAGLFNENKYTQDRQEKSNKELLNNIDKIIDEKLIAAFPKAETYIKKIKKDRTSGLFDFEITREQIDSLFASKEGTTYDEYRKADKKKIVLEILRNNFSDTFNFNEEADYLVNRIGELFGKTPKRKDFKGVDKMVYELTKLEPFFYKTSFNAVKQNSNDTKIKALFQIYSKDFSPDKNPNSKKNLHTLYFEELFSKENEENPIFKLSGGAEVFFRKKIDDYKIDQWEKKSLKNPKTDKLPNKKRRFTENQILFHLPIALNNINDGGSVNRKVHEYIQENEEVKIIGIDRGEKELAYYCLLDQSRAIVDGPKTLNIVGSNILKNKEGVEKKQSVNYRDKLDIKEKERMMARRSWTKIEGMKDLKAGYISNVVNEIARMMVDNNAFVCFEELNHGFKKDRSIRIEKGVYQRLENALVDKLSYLVLKKTLEGVRNALQLTPKNKAIKYWGNQMGAIFYTDAKFTSKTCPHCGFRRRGVEPMKKAKEIKEKFAKDQLKIFFEKSKDRFRIEYFWKVEAFDFSCENLYGKGKMEVIYSDVERNSSNNGSLKDIFKDYLQEDIELFSLVQNDAKFRYVDFGKVFNSLVWLRHTVERDSEMFDCISCPKCHFSTMSLKARKIKDGDANGAYNIARRGLMIYEKIRSEQLKKKMNTKDGIASKDLKINLKEWDEETYKQWDKMDWEVSGNIRGL

SEQ ID NO: 1462 - protein, 1465 aa, unidentified
  REGION 1..1465: note = Cas Enzyme sequence
MSEKTTQRAYTLRLNRASGECAVCQNNSCDCWHDALWATHKAVNRGAKAFGDWLLTLRGGLCHTLVEMEVPAKGNNPPQRPTDQERRDRRVLLALSWLSVEDEHGAPKEFIVATGRDSADDRAKKVEEKLREILEKRDFQEHEIDAWLQDCGPSLKAHIREDAVWVNRRALFDAAVERIKTLTWEEAWDFLEPFFGTQYFAGIGDGKDKDDAEGPARQGEKAKDLVQKAGQWLSARFGIGTGADFMSMAEAYEKIAKWASQAQNGDNGKATIEKLACALRPSEPPTLDTVLKCISGPGHKSATREYLKTLDKKSTVTQEDLNQLRKLADEDARNCRKKVGKKGKKPWADEVLKDVENSCELTYLQDNSPARHREFSVMLDHAARRVSMAHSWIKKAEQRRRQFESDAQKLKNLQERAPSAVEWLDRFCESRSMTTGANTGSGYRIRKRAIEGWSYVVQAWAEASCDTEDKRIAAARKVQADPEIEKFGDIQLFEALAADEAICVWRDQEGTQNPSILIDYVTGKTAEHNQKRFKVPAYRHPDELRHPVSCDFGNSRWSIQFAIHKEIRDRDKGAKQDTRQLQNRHGLKMRLWNGRSMTDVNLHWSSKRLTADLALDQNPNPNPTEVTRADRLGRAASSAFDHVKIKNVFNEKEWNGRLQAPRAELDRIAKLEEQGKTEQAEKLRKRLRWYVSFSPCLSPSGPFIVYAGQHNIQPKRSGQYAPHAQANKGRARLAQLILSRLPDLRILSVDLGHRFAAACAVWETLSSDAFRREIQGLNVLAGGSGEGDLFLHVEMTGDDGKRRTVVYRRIGPDQLLDNTPHPAPWARLDRQFLIKLQGEDEGVREASNEELWTVHKLEVEVGRTVPLIDRMVRSGFGKTEKQKERLKKLRELGWISAMPNEPSAETDEKEGEIRSISRSVDELMSSALGTLRLALKRHGNRARIAFAMTADYKPMPGGQKYYFHEAKEASKNDDETKRRDNQIEFLQDALSLWHDLFSSPDWEDNEAKKLWQNHIATLPNYQTPEEISAELKRVERNKKRKENRDKLRTAAKALAENDQLRQHLHDTWKERWESDDQQWKERLRSLKDWIFPRGKAEDNPSIRHVGGLSITRINTISGLYQILKAFKMRPEPDDLRKNIPQKGDDELENFNRRLLEARDRLREQRVKQLASRIIEAALGVGRIKIPKNGKLPKRPRTTVDTPCHAVVIESLKTYRPDDLRTRRENRQLMQWSSAKVRKYLKEGCELYGLHFLEVPANYTSRQCSRTGLPGIRCDDVPTGDFLKAPWWRRAINTAREKNGGDAKDRFLVDLYDHLNNLQSKGEALPATVRVPRQGGNLFIAGAQLDDTNKERRAIQADLNAAANIGLRALLDPDWRGRWWYVPCKDGTSEPALDRIEGSTAFNDVRSLPTGDNSSRRAPREIENLWRDPSGDSLESGTWSPTRAYWDTVQSRVIELLRRHAGLPTS

SEQ ID NO: 1463 - protein, 1466 aa, unidentified
  REGION 1..1466: note = Cas Enzyme sequence
MSENLFSHFTQQYSLIKTLRFSLIPILTEKQEKDIFYQKGYKNRDQIQRQDKIEKFFNENKQDVFEVDIERKKRYRALKYYLTELHKLFIKDALGKAKVNDSLNFSSLFEKYKDFEKEKDDNKKSQLAKGINEEKARLVKFFGNKDGKGGLFQKTAEDYYDWLKDNLNENEKIQDNKDEKQKKNNILLSQNVLLILAKKIKNDNIKEKVKNDKDGNNLYALNNIEYLKKEELRKGTLTEYFQGWSTYFKNFNEIRGNLYKDDGRKVDEGDIENDIKIRKANAGQITTRILDENFEIFVMNSIWAETNKKNLKTEDFQNKDIEDGISIFTPEFYVHCLLQTDINTYNAKIVELNKFFNENKKPNSDIKYLKTLQKQLLLTDKPDGEEDYFVYEILDDDELIKGLEEFSTLSREKIKGIKTFLQGKIEYNLEDIQLNENQLHYFCNKYFGSWSYIRDLYYQQNNIVDEDQAKKDSEFKDKEGISKVAISLLEIKELLNKETVENFIETIKNGWFCRDYKYPSKTNIDLLKNAGVYKEESGNFENFLSFLKFELDSLLNGRAFLTKREQEDKEKIKATKQSLKNSQKERERVDELLLNKFSEENFTQDIADSFEKKQEKFESAFTDLKKAIENKQKLQRAKDFECKKAINEYCTRISDINRYFALFSVPEGVTSGFLNTVVTEFKEDNQIVPLFNAIRNYITKRPEETEKVKLNFDYNNLLDGWVYKNSDHPASSDYHCRLFRKNDSIFLGIVGDAENNLIDSSYELMDYYQIKGQTIFGSTYAGLFNENKYTQDRQEKSNKELLNNIDKIIDEKLIAAFPKAETYIKKIKKDRTSGLFDFEITREQIDRLFTGKTGTTYDEYRKADKKKVVLEILRKNFRNIFNFNEEADYLVNKIGELFGKTPKRKDFKGVDKMVYELTKLEPFFYKISFNAVKQNSNDTKIKALFQIYSKDFSPDKNPNSKKNLHTLYFEELFSKENEENPIFKLSGGAEVFFREKIDDYKVDQWEKKRLKNPKTDKLPNKKRRFTGNQILFHLPIVLNNINDGGSVNRKVHEYIQENEDVKIIGIDRGEKELAYYCLLDQFGTIIDEPKTLNTMGSNVIDGVRQPINYRNKLDIRERERMIARRSWTKIEGIKDLKQGYISNVVNEIAKLMVDNDAFICLEELNHGFKKDRSIRIEKGVYQRLENALVDKLNYLVLEKTPEGVRNARQLTEKNRAIKSWGNQMGALFYTDAKFTSKTCPNCGFRKRGVSDFNNRENLREKIKNGDLKVFFEKKKDRFRIEYNWNYEYRMNNKTELYSNRDLYDQENNMEYIYSDVIRSDWYRKYDPTIKLKEIFKAFYQTSKENIAIKENHFSYSVFIEVFNIILNIRNRTNEEDIISCPKCHFSTLPPKVQKINNGDANGAYNIARKGLMIFEKIRSEKLRKKIYTKKGIESKDLKITLQEWDELTYSQWNKKDWNESNNERGL

SEQ ID NO: 1464 - protein, 1466 aa, unidentified
  REGION 1..1466: note = Cas Enzyme sequence
MSENLFSHFTQQYSLIKTLRFSLIPILTEKQEKDIFYQKGYKNRDQIQRQDKIEKFFNENKQDVFEVDIERKKRYRALKYYLTELHKLFIKDALGKAKVNDSLNFSSLFEKYKDFEKEKDDNKKSQLAKGINEEKARLVKFFGNKDGKGGLFQKTAEDYYDWLKDNLNENEKIQDNKDEKQKKNNILLSQNVLLILAKKIKNDNIKEKVKNDKDGNNLYALNNIEYLKKEELRKGTLTEYFQGWSTYFKNFNEIRGNLYKDDGRKVDEGDIENDIKIRKANAGQITTRILDENFEIFVMNSIWAETNKKNLKTEDFQNKDIEDGISIFTPEFYVHCLLQTDINTYNAKIVELNKFFNENKKPNSDIKYLKTLQKQLLLTDKPDGEEDYFVYEILDDDELIKGLEEFSTLSREKIKGIKTFLQGKIEYNLEDIQLNENQLHYFCNKYFGSWSYIRDLYYQQNNIVDEDQAKKDSEFKDKEGISKVAISLLEIKELLNKETVENFIETIKNGWFCRDYKYPSKTNIDLLKNAGVYKEESGNFENFLSFLKFELDSLLNGRAFLTKREQEDKEKIKATKQSLKNSQKERERVDELLLNKFSEENFTQDIADSFGKKQEKFESAFTDLKKAIENKQKLQRAKDFECKKAINEYCTRISDINRYFALFSVPEGVTSGFLNTVVTEFKEDNQIVPLFNAIRNYITKRPEETEKVKLNFDYNNLLDGWVYKNSDHPASSDYHCRLFRKNDSIFLGIVGDAENNLIDSSYELMDYYQIKGQTIFGSTYAGLFNENKYTQDRQEKSNKELLNNIDKIIDEKLIAAFPKAETYIKKIKKDRTSGLFDFEITREQIDRLFTGKTGTTYDEYRKADKKKVVLEILRKNFRNIFNFNEEADYLVNKIGELFGKTPKRKDFKGVDKMVYELTKLEPFFYKISFNAVKQNSNDTKIKALFQIYSKDFSPDKNPNSKKNLHTLYFEELFSKENEENPIFKLSGGAEVFFREKIDDYKVDQWEKKRLKNPKTDKLPNKKRRFTGNQILFHLPIVLNNINDGGSVNRKVHEYIQENEDVKIIGIDRGEKELAYYCLLDQFGTIIDEPKTLNTMGSNVIDGVRQPINYRNKLDIRERERMIARRSWTKIEGIKDLKQGYISNVVNEIAKLMVDNDAFICLEELNHGFKKDRSIRIEKGVYQRLENALVDKLNYLVLEKTPEGVRNARQLTEKNRAIKSWGNQMGALFYTDAKFTSKTCPNCGFRKRGVSDFNNRENLREKIKNGDLKVFFEKKKDRFRIEYNWNYEYRMNNKTELYSNRDLYDQENNMEYIYSDVIRSDWYRKYDPTIKLKEIFKAFYQTSKENIAIKENHFSYSVFIEVFNIILNIRNRTNEEDIISCPKCHFSTLPPKVQKINNGDANGAYNIARKGLMIFEKIRSEKLRKKIYTKKGIESKDLKITLQEWDELTYSQWNKKDWNESNNERGL

SEQ ID NO: 1465 - protein, 1466 aa, unidentified
  REGION 1..1466: note = Cas Enzyme sequence
MSENLFSHFTQQYSLIKTLRFSLIPILTEKQEKDIFYQKGYKNRDQIQRQDKIEKFFNENKQDVFEVDIERKKRYRALKYYLTELHKLFIKDALGKAKVNDSLNFSSLFEKYKDFEKEKDDNKKSQLAKGINEEKARLVKFFGNKDGKGGLFQKTAEDYYDWLKDNLNENEKIQDNKDEKQKKNNILLSQNVLLILAKKIKNDNIKEKVKNDKDGNNLYALNNIEYLKKEELRKGTLTEYFQGWSTYFKNFNEIRGNLYKDDGRKVDEGDIENDIKIRKANAGQITTRILDENFEIFVMNSIWAETNKKNLKTEDFQNKDIEDGISIFTPEFYVHCLLQTDINTYNAKIVELNKFFNENKKPNSDIKYLKTLQKQLLLTDKPDGEEDYFVYEILDDDELIKGLEEFSTLSREKIKGIKTFLQGKIEYNLEDIQLNENQLHYFCNKYFGSWSYIRDLYYQQNNIVDEDQAKKDSEFKDKEGISKVAISLLEIKELLNKETVENFIETIKNGWFCRDYKYPSKTNIDLLKNAGVYKEESGNFENFLSFLKFELDSLLNGRAFLTKREQEDKEKIKATKQSLKNSQKERERVDELLLNKFSEENFTQDIADSFEKKQEKFESAFTDLKKAIENKQKLQRAKDFECKKAINEYCTRISDINRYFALFSVPEGVTSGFLNTVVTEFKEDNQIVPLFNAIRNYITKRPEETEKVKLNFDYNNLLDGWGYKNSDHPASSDYHCRLFRKNDSIFLGIVGDAENNLIDSSYELMDYYQIKGQTIFGSTYAGLFNENKYTQDRQEKSNKELLNNIDKIIDEKLIAAFPKAETYIKKIKKDRTSGLFDFEITREQIDRLFTGKTGTTYDEYRKADKKKVVLEILRKNFRNIFNFNEEADYLVNKIGELFGKTPKRKDFKGVDKMVYELTKLEPFFYKISFNAVKQNSNDTKIKALFQIYSKDFSPDKNPNSKKNLHTLYFEELFSKENEENPIFKLSGGAEVFFREKIDDYKVDQWEKKRLKNPKTDKLPNKKRRFTGNQILFHLPIVLNNINDGGSVNRKVHEYIQENEDVKIIGIDRGEKELAYYCLLDQFGTIIDEPKTLNTMGSNVIDGVRQPINYRNKLDIRERERMIARRSWTKIEGIKDLKQGYISNVVNEIAKLMVDNDAFICLEELNHGFKKDRSIRIEKGVYQRLENALVDKLNYLVLEKTPEGVRNARQLTEKNRAIKSWGNQMGALFYTDAKFTSKTCPNCGFRKRGVSDFNNRENLREKIKNGDLKVFFEKKKDRFRIEYNWNYEYRMNNKTELYSNRDLYDQENNMEYIYSDVIRSDWYRKYDPTIKLKEIFKAFYQTSKENIAIKENHFSYSVFIEVFNIILNIRNRTNEEDIISCPKCHFSTLPPKVQKINNGDANGAYNIARKGLMIFEKIRSEKLRKKIYTKKGIESKDLKITLQEWDELTYSQWNKKDWNESNNERGL

SEQ ID NO: 1466 - protein, 1466 aa, unidentified
  REGION 1..1466: note = Cas Enzyme sequence
DVEVEESTDDEATENGQAEESSTNEANEVKTFTGIRAVTKLRDCITTAKELLGDDAFAQQFALMGGKINEAESMFARIEKSVAEKENECKEKPESLSFQEWNTGGKGKDNEAVELFVLFSFDAGSVFTATLLKARVIQKGYLNKLLKSDPAKYVAIVEKYGLCGPEEQKDEKVGGKEPFKIVADARAKAQKAAPDKLPATNEAGKGYSDYIQAIRDKNGVVVPGFTAIRGFVTQAEENLANGGEKFVPWKIGTTEWKNFEFAAFEEALKALNQFKKKTKERDDERKKLQAVEKLYKGEGRKKATDEDGEDEGHLPGFRDDERFSIIADLHKTLAVEDGTEPGKTYEYGFSQAALRGYEELCAEWNKHVAPNESFSEEKAKKLREEVLKDHQREHRDDVGAVRLFEELLKKENWCLWQAPTENQEKTRKEKNHSANILRDYLRYQEVVERIAALDKKINYTPADASLSRRLFDFKAGAQGGFGHGYDKESDTLWFETQVAVKITDQQFTKQAVRIHYTAPRLLRDAARVLAEDEKLSDANWMQPMMRALGVEETTHDFSKHAVSLMPDWKSGSRSSTPDRLLLNFVLDLSKKKKKTDKTTPIEAFIAKLRKTKHEIWPWPRQFNVNGDYNDATLRWPHEEWEKAKKWKDFPKFDGKPVTWFEQTSLTSFRFVSVDLGQKQAGAYALMEASCCLSSEDKVKARYIGTVGEGANQRDWYARVLTTGLLKLQGENADVFRPEYVNGKPVKGTGKFREELSGSAGRKATDAECVQTISLLTDLQQLDLLDEDCRDAATLQKRLMFPDQNAKLLVALRRAQSFAGRLHRWCWFFCAKEERKDQAQRQRNAIKELAETDPHPWLPASTLEAAKKIYEQIKDKKEAVMPTLDPRIAGTLAEQLGLLMKNLPDWLEIIANRVYHSRRGRFVWSKHPDKTDCHLLGFKEWNQEERKKLTKDELMLAGQRGLSIERIEQMEELRKRCQSLNQMIRRSVGEPPLKSRDASIPDPCPAILAKLDNIKEQRRNQTAHMILVEALGLRLREPVELATTAERELAEAKDQHGEYEKADVRGRAISPDKPNDWRGVVDFIVIEDLSRYRTTQGRAPRENSRLMKWCHRAIRDKLKEMCQPFGIPLIETPAAYSSRFCSRSGVAGFRATELSPSMLNESKWRWRVKNREDGKEETKEQGERRQRWEAVFAELRSINKGRDGKTKGQEYRTLLVPDAGGSVFIPMAALDGDYQSPAKDFTKPKLARPMVQYLPVNLEMNQIKTPRLIHADINAAVNLGLRAVADPKVWSIHSRLRSEREVGSPVAAKTKKAKRAKKGTLPVEEPTSAPLEEIKPDKFFAKEKRKYGSRAESKGIEIVILSVGRAIVNSTKADDEKEKRRWLERAQKKTPKASDSRHPNFFADTANFFRAHWGAAKLQPLLAGDTHPTHLVSGKALWGFVKGQEWKRIGAINSDRLADWKHTQNET

SEQ ID NO: 1467 - protein, 1466 aa, unidentified
  REGION 1..1466: note = Cas Enzyme sequence
MNRIYQGRISKVEVFRGKDAEGEEQWNLVGFTREKFEQFQKEKEHLQQLAKKKSPQGIDARKELKAIELQLNQPWQTALWEHHQCFQDAINYYILALASLADPKHTTDRLLKDLRARVEFAWSGFPRPVEGEARGLRQSVANWLELSSDASLEDAFEAILYGNKATPQVRVLALALLLDRCGGEAAIQQGGRGYLPRFCDSKAKPTYDFSSVSQAAGLGKNQLSQVLHGEASESELTKIAEAMDVSWTVKLQPGEFFPPEDSIARLHEAVKHIREMLQKPVADRVKEVATLFPDFDKQLDSFKAVMDAGTREFIIPRNRKASKDLTFATLAFKFFPCPLTAKVLSLFIKRPKAGATEKSGDEIDFGACGDDPIKLSRGDRGFVFRAFTALPAWCPKSPGEPVWKEFDIAAFKEALKSLNQFNQKTLERTEEENNLRGQLAIMLGSGIKGWKPRKTETNDDEPVPVLLDPKLFQLARELEADLTQDLADTVVGEERSIEFGAAIYKYHEGEWQLSSASLRGYRNIAEEWNALHAKSAGVVTTDELEEVVKKFQRDEKNKKSLGSISLLLRLCEQKYWPLWLARDEGEEDPSSEKTFLESMVLFHTSFRDFERSQEPINLTPAEPKHSRRLYMFSDLTDKTARVVFGKNDEGFTVECAIAMRAGKGGMTEQRIRLIYSAKRLLRDELQGGVESRWLQPMTRALGLEMPGNTGQAAFESAVSLMPDFVHLSDKSNSEELRFLLNFPVTLEPAWIHSGLGKAEIWKGQFNGVRDKNLHLHWPGTIKGKGAERPWWKKKQIIENGFTCTSVDLGQKIAGAWALLRVICWDPRKTDKPTKRPVRKIGFDGERTWYAEVISTGILRLPGEDQKVVGPDGKKVEHFGKSGRNALESEWTDGKELAKALLAQNPEVWLGKTLTEKSLPEQNDSLLALANRRLSRLNTFHRWSCFDPDRPEVIVRRSKLINKLIEELGHWEDDEVKAWSRLIEKEDFAGFRNAAGTAFDSLRLKLGDHLVTLANRVAPLRNRSWLWDRSKGNAEQGLYGELLDTGNQLTIKATWIRGQRGLSLPRIEQLENLRRLFLRYNRSFDRQAQTAVKFGKVDFGRRSGEPCRLLLEKIDRMKEQRINQTAHLILAEALGLRLKEHEIAPPERKDRDIHGEYEKIPGREPVDFIVIENLDRYLTSQGRGPSENSRLMKWAHRSVREKIKMLAEEPFGIPVVEAAAAYSSRFCAITGVAGSRCEERAKLDDYLKESFEKRAKRPSKSGQPPPGVFTIFLNQFNELEILNGELKKNNDENRKRSSPFYTLFLPKQGGSLFLPVCKKESHAVRRLPKQADINAAVNIGLRAIAAPDAFDLLHKVRAQKENDCLKPVIKNAREKAAFDAKTIITLEGKASSKLLTARSPNFFFDAKAFDSFDTASLKSLNQTVSLVSGVGLWSTVNESFPQQLVEINQKRLENWRKQAAKTDDVTY

SEQ ID NO: 1468 - protein, 1468 aa, unidentified
  REGION 1..1468: note = Cas Enzyme sequence
LRSIDPLDTTWRDALWATHEAINNGAKVFGDWLLTLRGALSHDLAEPPPPTKNSRTPEEAATLRKNRRILLALSWLSVEDERGSPIGEVRVAMGTDAESVRQEKVLAAFRNILLSRGITGVEVDSWIDDCSASLSSRIRDDAVWVNRSAAFNAAVKQIGPSLTSDEVWDILEPFFGSREAYFAGVSLADDDDAGSEEKAKDLVQKAGQWLSSRFGTGTGANFASMAKVYAAMTAWARQASSINNGPEAIADLARHLAPFSPESSDADGLLSLIRGPGYKSATRNVIKSWESRPAVAPNLNKFAETTAADEAKCKANVGGKGRRPWSDAIIKCVEAVCGFTYLQDNGPARHSEFAVMLDHAARRVSIGHSWIKRAEAERRRFEEDARRLADVPSDAAAWLERFIADRSGTSGAAAAGGEYRIRRRAIEGWDEVVKRWKRASCKSVQDRIGAAREAQADPDIDKFGDIQLFEALAAEDAEYVWRQDGIATTEPLRDYVAGQDARFKQRRFKVPAYRHPDPLRHPVFGDFGNSRWEIEYAVHAAAKAAGANRKLHADRAAWLKDHRGLCMGLWDGNCMRDVPMRWSSKRLMKDLGLGQPAGDRPVRDVTRADRLGRAASGLQKNETPSVAGLFALDDWNGRLQAPRVQLDAIAKRVDKHGWDAKAKAMRDRLEWLVSFSTKLACRGPFVEYANRFADDASTKPFLSRKGELAVRHESNAHRQGHAKLILARLPGLRVLSVDLGHRYAAACAVWETLSQTAFMQEIAGRATIAGGRSEHHLYCHTKHTDPKTKKERTTIYRRVGADILADGQDHPAPWARLDRQFLIKLQGEEKPARKCSPDELKSVQAIELDLGRVRDEAIALPMRVDDLMAETVRTLRLALRRLGDAARIAYAFKPDAVKNTPGGGSQPHTPETRKAAVLDALMRWSDLAHGDRWKDTWAVQAWNEHVKCKLPVLADEADRVERKRHRTQVEKQLEPIATRLVESGTAPLHALWADHWKELDAGWRPRLKQVRHWLLPRGLRARQNETQAQLDARKARLGSARYVGGLSLTRIATIRELYQVQKAYAMRPEPDDSRRNIAAKDEDRYDEFGRTVLKVMDRLREQRVKQIASRIAASALGLGGHWKEIERRDHKGKPLLGKDGKPRTKHVWVEEPAAKYPACHAVVIENLRNYRPDELLTRRENKALMTWSAGKVRKYLEEACQLHGLHLREVMPNYTSRQCSRTGQPGIRCTDIPINEHGAPDAFWWPKALAAAKKRTGEDGKGDTESRFIVALDKHLTDLKSANKPLPKFVRLPRNGGDLFVAATPQNGSPLRGGRVALQADLNAAANIGLRALLDPDFPGKWWYVPCIEDKSAGTAFPRTDKVKGSACFGPDPSKPELFGSLVPVKDGQGQVSKAGKRKRGADPEGKETTNFWCDPGMSALRPAAKGGLWKPTPEYWKGVQMRTVAALWSCNGLGIHGSPDLAPDEEA

SEQ ID NO: 1469 - protein, 1469 aa, unidentified
  REGION 1..1469: note = Cas Enzyme sequence
MPQQDKPPVTQRAYTLRLRGSDPSDTSWRKALWQTHEGVNKGAKAFGDWLLTLRGGLDHTLADTKVKGGKGKPDRDPTDEERKARRILLALSWLSVESKIGAPAVYIIASGKEAAEDRNGKVVAVLEEILRSRNVAENEIGEWKNDCSASLSAAIRDDAVWVNRSKAFDEAVKSVGCSLTREEAWDMLERFFGSRDAYLAPAKGSEDESSETEQEDKAKDLVQKAGQWLSSRFGTGKGADFCRMADVYGKIAAWADKAQAGMTGNDAINNLAAALNESTLASNDLQGVLGLISGPGYKSATRNLLNQLATKTTVTQQDLASLKDKATKDAQKCNQNTGSKGRRPYSDAILKNVEAVCGFTYLQDGGSARHSEFAVMLDHAARRVSLAHTWIKRAEAERRKFEEDATKINNVPSAAKNWLDEFCRKRSETSGALEPYRIRRRAVDGWKEVVAAWSKSSCSTSADRIAAARALQDDPEIDKFGDIQLFETLAEDDAVCVWHKDGDAAKAPDPQPLIDYALAAEAEFKKRHFKVPMYRHPDALLHPIFCDFGCSRWSIKFSLHEAKKNAEKKRKKKDDVQQPDSPRSLWMTLWTGKEMKLVPLRWQSKRLARDLALGQDARKDGASEVTRGDRLGRAASNVTKSDDVKISGLFEQADWNGRLQAPRQQLEAIARRVNNHGWDETAKKMRDRLQWLVTFSARLQPQGPWCEFAEKLQLRINPQYWPHADTNKDRKGHARLILSRLPGLRVLSVDLGHRYAAACAVWEAVNAEQVRGVCQIAGHEEPKASDLYLHLKRKTTKQKKGKEVEVEKTTIYRRIGADTLPDGTPHPAPWARLDRQFLIKLHGEDEGTREASNEEIWAVHQMETVLGRSVPLIDRLIAAGWGCTEKQKARLEELNKLGWTSVPKAESSGEQEENEEADVYKPSLAVDELMSSAVRTMRLALKRHGDLARIAHYLITDEKTKPGGTKEKLDENGRVDLLQDALVMWHDLFSSRGWRDEAARQLWDEHVAKLSGYKAPEEIGEESSGPERKKKQKENREKLYDVAKAMAQDVILRETLHDAWKKRWKDDDERWKKQLRWFKDWVLPRGKHASDPTIRKVGGLSLPRLATLTEFRRKVQVGFFTRLQPDGTRAETKEQFGQSALDALEHLREQRVKQLASRIAEAALGIGRMRRPMGGKDPKRPDVRVDEPCQAIVIEDLTHYRPEETRTRRENRQLMTWSSSKVKKYLAEACQLHGLHLREVSASYTSRQDSRTGAPGIRCQDVPVDEFMRSLFWRKQVKQAEAKQSENKGDASERFLCDLNAKWKDKTVADWEKAGVIRVPLRGGEVFVSADPNSPAAKGLQADLNAAANIGLRALTDPDWPGKWWYVPCDPASFKPTPDKVKGSAAINLDMPLKDASVVSGDATMKKAGKAKSQSKEVVNLWRDVSSREVSTTDVAWEVYSAYQNQVQTRVVNILRRSACPKDNREKQS

SEQ ID NO: 1470 - protein, 1469 aa, unidentified
  REGION 1..1469: note = Cas Enzyme sequence
MEIPTTQRAYTLRVSGRDKNDHGWRNWLWRTHEAVNKGAKVFGDWLLTLRGGIDHSLADVKDESERTNRRIVLALSWLSVESQNGAPPKRFHVSADGTTDALAEILRLRKVSKPEIESWQRDCRASLTAATRLDAVWVNRSALFDEAAREIGKSLTRDEVWDLFDRFFGSRDAYFEGLATADEDDEEGGGAEEERAKDLAQKARGWLSNRFGSGSGADFSAIADEYDGFAKWCRWFHEHPKESIETSAKQLRKALRIDELPERLASTPGPPNRVQTTYQAIVAAISDGKRLPKEEYAELAEIADSQAEAKRKLVGRKDSKPWANKILDDVIEACRIPYRDTAAEADLINEYSVILDHAARRICMAHSWIKLAEANRQEFTKDARKLDELREYAPAAVSQLDNLCDERTKVTGAIEDYRIRRGAITDWERVVKSWSRKKCVTSADRIAAAREVQAEPENEKPGDIQLYELLAAENYLSVWKQGDKATHKTLQDYVAATDAQAKQRRFKVPAYRHPDPLLHPVFCDFGESRWSVDYSAHRAPAGRNNAHALLAKRTADLAKAREAMFKAKNAELRQKAQEKVSKLESAAAQALDDTQFMELRHGLRIKLFDGSCVDERDLVWHSKRLDSDLALRSDSSPGDELPIAVSRADRLGRAAAGANADAAVAVADLFKLKEWNGRLQAPRAQLNAIAAVRDRKRNKDLSMGDRKARVERMISRLQWLVTFSAKLQPQGPWLTFCQRLPEGFNYDPKKRRLYHKANKNRKGRAQIILARIPGLRVLSVDLGHRFAAGCAVWETLSSGDMKRACNEAGVPVPSTDDLHKVIKRDKRRTIYRRIAADRLPDGTPHPGPWVRLDRQFLIKLQGEESAARLGSPAEIAAVDRLEAELGYSRARPRTKAESSVDLLMAEAVRLVRLGIGRLKRRMRIAHQLTARQVAGMAQKKVKLDDAGRREVLTKTLRDWHDLATSRDWRDEFAVRTWQTHILPLVAGAELPEVPQLETGAARKKRLTAAEERLAPVAERLVARDVTTMREEWAHFVRAEKQLWQKRLRWLRDWLLPRKGRRNAASIRRVGGLSVLRIATLKELYQVQKAYRMLGDPDDPTKGIPQRGDDSLDRFGQRVLTAMERLRENRVKQLASRVIEAALGFGREPGSTGNKQNARSQSQTHEPCHAVVIENLKNYRPDESMTRRETRQLMAWASATVAKYLDEGCQLYGLYIRQVPAAYTSRQDSRTAAPGTRCQDVSVERFLRPHWAVVRSVNDLLPDAESAGMDFQERVTAAEKLVRSGKGNAEQRFLVELYQHSRKLPEQKRRGRSVRIPQRGGELFVSADRRSPIARGIQADLNAAANIGLKALLDPDWAGAWWYVPVDDRTYKPVEKSVAGSAALSISQALSEPPQRGDDEKERNKKKPSTRRGSSGDPQEIINLWRFVSAKELPKDKWFDYQQFQNIVRKSVIDILRAQAGIPEDRVGTQ

SEQ ID NO: 1471 - protein, 1469 aa, unidentified
  REGION 1..1469: note = Cas Enzyme sequence
MARKSESVADPPTAEAPLTQRAYTLRLRAVDPQDDSWRDALWATHEAVNKGAKVFGEWLLTLRGGLGHELAEPPPLPKGKTRSDDETAALQKSRRILLALSWLSVEDARGAPDGAIRIASGEDADSVRRDKVLATLRSVLAGRGVGQRAIESWISDCADSLSARIRDDAVWVNRSAAFDTKTKELRGLTHKYATETILSFFGPADDYFSLPDADADDGATLAAGDDDSKFKQKARQWISTNFGTGEKSDTGQIIESLRKLAKAELDRFARRPKAELIEAMSRKVHGPTPDFDGLRAGIGWSTGRPSKGRLAVEKLPDRPTKTDIEALQQKFAEEADDKESKSGARDVPKWMPGFRAFVEAAIGMPFVGSRNHIGEFSVMLDHAARRVSIGHSWIKRAEAERRRFEADAQRLGTVPADAAAWLDAYVRDRSGSAGGEYRIRRRAVEGWDEILKRWKRPTCASAEDRIAAAREVQADPEIDKFGDIQLFEALASDDALSVWRNGNDIAPDRLKDYVFAHDARFKQRRFKVPAYRHPDALRHPVFGDFGNSRWKVEYSVLEAAKAARGDRRISAQDAEWIENPRGIRMGLWNGDAVKDFDLWWSCKRLSADLALRQPAHNGQVRSVSRADRLGRAASGIKPGESPSPAGLFSQAEWNARLQAPRSQLTDLAAYLDRSDGRWDDRARKMRDRIAWLVTFSAKLECRGPFIDYAARHGITPNRKGEYYPNADRNKADKREGHAKLMLSRLPGLRVLSVDLGHRFAAACAVWETLSRAELKKEIAGRSVIDGGAGATDLYLHTRHTDCAGKERKTIYRRIGSDQLPDGSDHPAPWARLDRQFLIKLQGEESRARKASADEIETIRQMEIQLGYVREAHKPLPAQIDELLSEGVRLVRLGLRRHGDAARIAYAFHPEAARLTPGGGVEAHTPDTRQQAILDALIRWHGMAMSDRWSDPCAMDAWQTRIQPALTTELPALTPDADRWERNRFRTALEAALTPVATALSREGAETLHTLWSERWEADDAAWRPRLRQLRRMLLPRGLRPVAGDTDAQAAARKARRGAARHTGGLSLTRIATIRELYQVQKAYAMRPEPDNPRKNIPESNDDRFAEFGRSILEAVERLREQRVKQLASRIAEAALGVGRAPRTGDHDRKRPLSPVDAACHAIVIESLRNYRPDELQTRRENRALMNWSAGKVRKYLEEACQLHGLHLREVMPNYTSRQCSRTGLPGLRCDDVPIDEFLTAPWWNKAVNAAAKRLQENGNDSLDRLLVALRENRSGATTDSDKCSQRTLRLPRAGGDLFVAAPPSGDATKGRHRGALQADLNAAANIGLRALLDPDFPGRWWYIPCIEDKAAGTAVPRADKVKGSVCFGPDSSKPEQVGSLLKPGAGDSSDGQSRPARRQRNRRSNAEGKETTNFWSDPRAAALRNAKDGGFWLPTPAYWRWVRKRVVDALWEANGLGAPPADLVRDGRA

SEQ ID NO: 1472 - protein, 1469 aa, unidentified
  REGION 1..1469: note = Cas Enzyme sequence
MEINPTPRAYTLRLSGTGDWRDRVWATHTVVNRGVSVWGDWLLTLRGGLPASLANDHPERRVLLALSWMTVERSASHLPDSCRIVRGDELEPTRVQRVMERLRQVLVRQQVYDVAAWEVACKPAITARIREDAWWIDRSECFVALQGSTPGLTPEWAQNTVFELLGDCETYFELPNPESAAASDAKDFVQKAGGWLSRNWGSGEKCDSTAIVHRLRRLAEINDAEIVGRTGGEVKLAMIAALGSPAHSVRNPEALFKEIKRIIGWKGAPSMGAKALQRLVGATRVESEVWALAKEKLLAEAVAKEASGEGTGGPPRWMNEWRRTMEERIRMRFREQRDHLWEYGVMLDHALRRVSGVHSWIKRAEVDRATFQVDAAKIEAVPELARTWLDGFREKRSVVSGARGEYVIHRRALDAWPKVVQGWAALGNHSTREQRQESARSTESILSDNEKFGDIQLFEALAIDEAHPCWQRPDGTPDPQILIAYSAATVAEFKQRRFKVPAYCHPDPLRHPVFVDFGKSRWSISYSALKSAQAHARGAAKTPTGTRANTKNGISDRDGAPGDLRTVTLNLWQGSAMVSTVFRWHSKRFSKDLILPHSEATSAASATRGDRFGRVVAGTPRGAVGIANLFQEELWNGRLQAPRRQLDHLADLIYGKHGEPSWDRLDKALGTPASSIVDRSLKRLRWLLTASAKLQPSGPWLDYVARGLPPGVSYKVSAKGAFLNYVANTGRRGASASLRLARLPGLRILSVDLGHRYAAACAVWETLSADQVAAACRASGIGLPSAEQPFIHLRRRSLEMKAGDDRENSAAGTTIYRRIGPDVLPDGVPHPAPWARLDRQFLLRLPGEERPARFSRLDEYEVYHSLLAASGSPTDYCSSLEKDQTRVRLRIDELQAKAVRAARLGLRRLGNLARIAHAFTATARPGTGGQPTSLTTTEARVAHITEALMLWQDLAGDAASGDAWANGLWEEWVRTRLGGPVLLPMSGARLDRREKKTRIEEAEAALRGVAERLADPHAQESVALHELWSAEWERRSENWRRQLRLLRRLILPRIGQRPKSSDRVALERWKKKAVEIRRTGGLSLRRLNTVRGLYQVLKAFRMRPEPKDLVANVPAEGDGSLARFGDRILTTAERLREQRVKQLASRIVEAGLGVGSENRRAHWNGRKRANVAIPDRRFAPCEVVVIENLENYRPEETRLRRENRQLMNWCARNIRKHILEGCQLHGLYFTEVSPHYTSRQDSRTGAPGIRCEAIPRTVLEEAVREVGLTQPTGEQTQNAVSRLRRELVRLENLPATERSARECVLLKAKERLRDLPRSVGTILVPRQGGELFVSADVGSPTVGGIQADMNAAANIGLRSLMDPDWIGAWWFVLVDAKTGVPDGKRVEGCPFWRDRVSTQLLAAAEGLRKSRRGSRQDESQKVYAWRGGGWDESGWGSWGWQTTRDYWRLVEEKVVQNLVMRLQELETPW

SEQ ID NO: 1473 - protein, 1470 aa, unidentified
  REGION 1..1470: note = Cas Enzyme sequence
MVKQAAVTQRAYTLRLRGVDPQDQSWRDALWATHEAVNKGAKAFGDWLLTLRGGLDHALADAKVKGGKGKPDRDPTDEERKGRRILLALSWLSVESEKGAPEEYLVPHDLDKQSGTRSNWKTVDALREILRGRRLDESEIESWVRDCSASLSAAIRDDAVWVNRSKAFDDAVESVSSSLTRDEVWDMLERFFGSREAYLAPAKGAEDESAEVEQEDKAKDLVQKAGQWLSSRFGTGKGADFSRMATVYKEIANWAGKAQPGMTGDKAIADLAGALSEFSPTSNDLRGVLSLISGPGYKSATRNFLSQLATRTVVAESDLQSLQKSAKHDAQKCTANTGAKGQRPYSRVVLEQVESACGFTYLQDGGPARHSEFAVMLDHAARRVSLAHTWLKRAEAERRRFEEDAGRMGNVPASVKQWLDSFCADRSEASGALEPYRIRRRAVDGWKEVVAAWSKADCKTAEDRIAAARALQDDPEIQKFGDIQLFEVLADDEALCVWHKDGDSAKAPDPQPLIDYVLATDAEFKKRQFKVPAYRHPDALLHPVFCDFGNSRWDISFAVHEAGKSTVRKKKGQWQNSDPHALSMTLWTGSTVEPRRLRWQSKRLTRDLAFKEGKQNGNAPTVGRADRLGRAAAGVPEHGAVSIAGIFELEDWNGRLQAPRAQLNAIAARVARHDWDAKAKQMRDHLRWLITFSAKLQPSGPWLEYAAAFPDDAPAKPFVSRKGDYAVRHQGNDAREGHAKLILSRLPGLRVLSVDLGHRYAAACAVWETLSAKQVKAACQAAGHEPPKDSDVYLHLTKKVKKQKKGKEVEVEETTIYRRIGADTLPDGKPHPAPWARLDRQFLIKLQGEEEGAREASNQEIWAVHQMETVLGLSVPFIDRLIAAGWGCTEKQKSRLEELKKIGWTPAPKAESSGVQKENEEVDVCKPSLAVDELMSGAVRTVRLALQRHGRRARIAFNLTASKKLLSGGREEGLTDEGRVELLADTLADWYALFTGKGWTDEWARQQWETHVTPLLQGAALPKIPEDAEAAPKARKEYRADLTEHLKPVAETLAKDESLCARLHCLWATRWRENDVALRKRLRWLRDWILPRGRKAEADRAIRRVGGLSLTRIATIKSLYQVQKAFHMRPEPEDLRKNIPSKGDDALLDFGRSILDVMEHLREQRVKQLASRIAEAALGIGRMKRFAGGKDPKRPRERVDRPCHAVVIENLTHYRPDETRTRRENRQLMSWSSSKVKKYLAEACQLNGLHLREVSASYTSRQDSRTGAPGVRCQDVPVKEFMQSPFWRKQVAQAEKKQAKGKGDARERFLCDLNAKWKGRPEADWEKAGAVRVPLKGGEIFVSADEKSPAAKGLQADLNAAANIGLRALTDPDWPGKWWYVPCDPTNFKPAKDKVAGSPAICLDKPLKDTDGKAGARSREVVNLWRDVSSQPISANDDWREFTPYWNDAEARVVNILRQSAGLARDQGER

SEQ ID NO: 1474 - protein, 1470 aa, unidentified
  REGION 1..1470: note = Cas Enzyme sequence
MNNPRGAFGGFTNLYSLSKTLRFELKPYLEIPEGEKGKLFGDDKEYYKNCKTYTEYYLKKANKEYYDNEKVKNTDLQLVNFLHDERIEDAYQVLKPVFDTLHEEFITDSLESAEAKKIDFGNYYGLYEKQKSEQNKDEKKKIDKPLETERGKLRKAFTPIYEAEGKNLKNKAGKEKKDKDILKESGFKVLIEAGILKYIKNNIDEFADKKLKNNEGKEITKKDIETALGAENIEGIFDGFFTYFSGFNQNRENYYSTEEKATAVASRIVDENLSKFCDNILLYRKNENDYLKIFNFLKNKGKDLKLKNSKFGKENEPEFIPAYDMKNDEKSFSVADFVNCLSQGEIEKYNAKIANANYLINLYNQNKDGNSSKLSMFKILYKQIGCGEKKDFIKTIKDNAELKQILEKACEAGKKYFIRGKSEDGGVSNIFDFTDYIQSHENYKGVYWSDKAINTISGKYFANWDTLKNKLGDAKVFNKNTGEDKADVKYKVPQAVMLSELFAVLDDNAGEDWREKGIFFKASLFEGDQNKSEIIKNANRPSQALLKMICDDMESLAKNFIDSGDKILKISDRDYQKDENKQKIKNWLDNALWINQILKYFKVKANKIKGDSIDARIDSGLDMLVFSSDNPAEDYDMIRNYLTQKPQDEINKLKLNFENSSLAGGWDENKEKDNSCIILKDEQDKQYLAVMKYENTKVFEQKNSQLYIADNAAWKKMIYKLVPGASKTLPKVFFSKKWTANRPTPSDIVEIYQKGSFKKENVDFNDKKEKDESRKEKNREKIIAELQKTCWMDIRYNIDGKIESAKYVNKEKLAKLIDFYKENLKKYPSEEESWDRLFAFGFSDTKSYKSIDQFYIEVDKQGYKLEFVTINKARLDEYVRDGKIYLFEIRSRDNNLVNGEEKTSAKNLQTIYWNAAFGGDDNKPKLNGEAEIFYRPAIAENKLNKKKDKNGKEIIDGYRFSKEKFIFHCPITLNFCLKETKINDKLNAALAKPENGQGVYFLGIDRGEKHLAYYSLVNQKGEILEQGTLNLPFLDKNGKSRSIKVEKKSFEKDSNGGIIKDKDGNDKIKIEFVECWNYNDLLDARAGDRDYARKNWTTIGTIKELKDGYISQVVRKIVDLSIYKNTETKEFREMPAFIVLEDLNIGFKRGRQKIEKQVYQKLELALAKKLNFLVDKKADIGEIGSVTKAIQLTPPVNNFGDMENRKQFGNMLYIRADYTSQTDPATGWRKSIYLKSGSESNVKEQIEKSFFDIRYESGDYCFEYRDRHGKMWQLYSSKNGVSLDRFHGERNNSKNVWESEKQPLNEMLDILFDEKRFDKSKSLYEQMFKGGVALTRLPKEINKKDKPAWESLRFVIILIQQIRNTGKNGDDRNGDFIQSPVRDEKTGEHFDSRIYLDKEQKGEKADLPTSGDANGAYNIARKGIVVAEHIKRGFDKLYISDEEWDTWLAGDEIWDKWLKENRESLTKTRK

SEQ ID NO: 1475 - protein, 1470 aa, unidentified
  REGION 1..1470: note = Cas Enzyme sequence
MMPQQKIPRTQRAYTLRLRGADPRNTSWRKALWQTHEAVNNGTREFGDWLLTLRGGLDYTLVDDKVKGRRGRPDRAPNVDERRARRILLSLSWLSVESEIGSPARYIVASGKESSEERNRKVLAALEEILKSRNVPDAEIVEWKNDCAASLSAAIRDDAVWVNRSKAFDDAVKLVGCSLTREEVWDMLECFFGSPDAYLAPAKGSEDEASESEQEEKAKDLVQKAGQWLSSRFGTGKGADFSRMEKVYKKIAAWAHDDAHAETTGNQAVRNLAAALREFTPASEDLKGVLGLISGPGYKSATRTLLKQLAGKSTVTLQDFMNLKEKAADDAKKCQQMIGRKGQRSYADAILKRVESVCGFTYLQNGDRARHSEFAVMLDHAARRVSLAHTWIKRAEAERRRFEEDASKIDNVPEQARKWLHEFCEKRSQELGAVEPYRIRRRAVDGWREVVAAWSMSACGTRDDRIAAARALQDDPDIEKFGDIQLFEALAEDDAACVWHKDGDPAKEADPQLLMDYALAVEAEFKKRLFKVPAYRHPDALLHPVFCDFGESRWRIIYDCHKNQQEPSSHRLSLTLLSGKNEMRNVSLFWQSKRLARDLSLGVSARNEEKREVSRADRLGRAASNVAKNGAVKIAGLFEEKEWNGRLQAPRRQLEAIATTKKNPNLSDEERERRIQGMIDRIRWLLTFSARLQPRGPWFDFAKNLNITKYAPHADANKSRKGLAKLTLSRFPGLRVLSVDLGHRYAAACAVWEALSADVVEEACAAAGHGKPKESDLFLHLKRKVTKRKKDNLVEVEKTTIYRRIGADRLPDGKRHPAPWARLDRQFLIKLQGEVEGAREASNEEIWAVHQMECGLGRAVALIDRLVACGWGVTERQKARLGALKSLGWKPVLKTASSGDDGESDAYRPSLAVDELMFSAVRTMRLALKRHGDRARIAHYLATDERTRLGGIREKLDESGRHALLTDALLMWRDLFSSNGWRDDVAKQLWNDHIANLPGYKVIEEEGDGVPRPVRKTKQEKNGEKLDDVVKALAQNVSLRKAIHNAWKERWEEDDGRWKKHLRRFKDWILPRGKAGDDPVIRKVGGLSLTRLATLTEFRKVQVGFFSRLRPDGTRAEIGEHFGQSVLDALESLREQRVKQLASRIVEAALGVGSEAPEHWDKGKRPCQRFNDSRFAPCYAIVIEDLTHYRPEETRTRRENRQLMNWSASRVKKYLAEACQLHGLRLLEVPAGYTSRQDSRTGAPGIRCQNVPVDEFMRSPFWRKQVRQAEAKQAEGKESDARERFLCYLNAKWKDKTVADWEKAGDVRVPLRGGEIFVSADPNSPVSRGIQADLNAAANIGLRAILDPDWPGKWWYVPCRPEDFRPLKDKVHGSSAVSPDHPLPHHLQAKRERLKEKKMRGKLESRSKDVVNLWRDISSSPLENSQAGEWKEYAAYQKVVQYRAIDNLKEQLKGRFSQLHDWSKEDDIPY

SEQ ID NO: 1476 - protein, 1472 aa, unidentified
  REGION 1..1472: note = Cas Enzyme sequence
MNRIYQGRVSRAELLDAKGETISQPDWDWEEALWDHHALFQDAVNYYTLALAALGEGLTGATEQGKAALAWREQVRGKWTRAQRKARAFDGPHKRLARLLGADAELGDSEKSFDACAARVIRANGATAEKRAAALLRLLELAGEDESGGNKLAKLCREKLPFFCKHSVGSGDDVTAGHQMVERQAQVPTILNATTESLASVAVKVDLRCFFRTPPTKPDYTGAEAITRLLECFDGITKPKKTRGKSTKVKPARFPELAAMRSQFEAGLRRLLAVDAELLRVPNANKPPAEMAPTAVFKFLPCVETWEACKVAVASVLKRKVDRSLVSDPISAVRSGGIVFDYFTNQTCVDPVGTKRSQAVWFEFDLAAFIEAIKSPHRYYQDTQSRDNDARKVREKLHAIDPEGPWLKDRPKAAPAKTKKAKVTVEHEEDETPVFTFAGDERIALLRGIVTDKLAWLGEAEEPDQPGEKKEYTIRQRTLRAWGEVRDAWRKLAAKGPVTPEMLWKEAAEIQAEHRDDYGSAALIQELATAENHSVWQKPAAANPLHADDPLQAWRLFTELRRELHDKERAIRFTPAHASESPRYFILPKSGRFGTEHQRAPKDAALLDFTCGIVLRTERGLEPTTVRLRYSAPRLRRDELRAPGEADLAGARWVQPMMQALGVKEADVQDFGNCRVTLQPEMIQPRGAGAGVEEKVRYNHQLTFPVELEPAALQAAIGKGPCWARQFNLHPDGDTFYDASLRWPHEKQPAKRPVPWHDALDAFTLVAVDLGQRDAGAFAVVTARAGGDASGKPSRILGQTGEGEAAKTWRAELEGSGLLRLSGEDRMEWRDTSKLEQSRGEHGFAWREELYGERGRNATADETEECADLLTKIGAREADLMPPAWRETLSFPEQNDKLLVAARRAQSRVARLHRWAEFLAKTDDAKRRANALEEIQDVRKDAMGNPDQAQAALAALAKDGKAEELRATIFDELRRGTAGLPPLLVQIANRVLPLRGRSWCWRANPAKPDCGLLDQSGPKREEVRLRGQRGLSMERIEQIEELRKRFQSLNQSQRRTPGGPAPKRRDDSIPDPCPALLEKLDRLKSQRINQTAHMILAQALGVRLSVPTADKARLRGERDQHGQYEKFRMPVDFIVIEDLSRYRSSQGRAPRENRKLMQWCHRAVRDKLKELCEPFGLPVVETPAAWSSRFCARSGVAGFRAVEVHPGHRNEPPWAWHLRRWKEFQQTKDTLPDEERKKQEEKLADARKVAGLFTTLDHANRDTDRDAPRPKWRTLYAPQTGGPIFLPFSELESDSSFQRRLELAHASKDGNGKLAPIIRYKLVVGGEMEPGVVQSDINAAVNLALRAIADPRRWSIHPRLRTQRDGKGGELCAREKRKYGTKNAPTLSIEKVARVDEDDTRQPNYFYDASCSVPWGHAEVEDPLTNDKVRLVSGAAMWKTVREAQWDRIDQINSRRLKAWDTKREQADDIPM

SEQ ID NO: 1477 - protein, 1472 aa, unidentified
  REGION 1..1472: note = Cas Enzyme sequence
MPETPTTTRAYTLKLSGNDDWRKSLWTTHVTVNRGVQVWGDWLLSLRGGLPASLTDADPKRRILLALSWLSVESPASLVDEKWIVPGATGLEKPETRAAAIRSRFTAILKRRGITDLQPWLDACLPALTARIRDDAVWVDRDAAFLDLVKQTKNRLITPWATSTLFELLGGEAEFFKMEDEESDEPKAPAEAKDFVQKAGGWLSRNWGSGKKSDAQGIADLLTTMSEVSSKKLVGKSGVGALRTLVEAMGGEPAGSSGEDLYSSLKRTVGWKGRSSKGAMALEKIRDASLVDEATWTLVRGKLQEEAAAQAGKSETKAAAPDWMPLVRSTLENRIGMPFRMQRDLTWEHAVILDHALRRVSSAHSWIKLAEAERRKFQTEAELDRGLSAEAKRWLDHYCDERSESSGAGEEYFIRKRAIDGWEKIVSAWAGLANATPQLRVQAARDVQSNLDDNEKFGDIQLFEHLAVDDAQCVWMSSGKPDAAILKNYVTATSAAFNQRRFKVPAYRHPDPLRHPVYVDFGNSRWSIGYSALEEVQSRKKLSAKLPSAKTEAARKKIQSDLDRPPNLHGVTLSLWTGDVVEPNELRWHSNRLRRDFDFNHFGEDAKGTVSRADRLGRAAGRTTDPAVAIASVFDQKDWNGRLQIRRDQLERLADVLYGRDLATRKRNPPTYAALDGFLKGQSASDAKAKKLWDGLDWFLSFSAKLQPAGPWLDRVAEGLPDGIQYKQGKTGWFVSYDANKERRGRARLLLSRIPGLRVLSFDLGHRYAAACAVWETVSTEALLAACKRHKHAPPGLDDQYVHLRIETAKLQKSGRRKGEPVTQTIIYRRIGPDRLPDGTIHLAPWARLDRQFLVKLQGEDREVRFATKTEFDQVNELREFLGLTKDPVLPLRTILGSVNIRVDAVMKEAARLARLGLRRHGDAARIAHALTATSKPIAGGRSIPLEGPKNRPARIEYILDALMLWQSLAKSSDYSDVWALNLWNERINSQGSYPLLEIPANATRPERQKRTDAAREKLQSVAEVLADRDNADLHQLWADRWRERDARWQKGTLRWLRDWVFLRKTPSQPGDGKSARQVGGLSTARLKTMRDVYQVLKAFHMRPEPENPRQNIPEAGSDQLANFGRRMLNRLEERREQRIKQLASRIVEAALGVGSELGKHRQGHARPQQPIGDARFQPCHVVVAENLERYRPEESRFRRENRQLMDWAARNVRKFIREGCELHGLHFVEVSPNYTSRQDSRTGAPGVRCEDIPFSQFAAAIAPATATPQGLDRRTAYLRQRIQRAQDKVVDPNSRPADQLLVFFQQVFRSRNEGRTPVRVIRPGGEIFVSSDPCSPAARGLQADLNAAANIGLKPLLDPDWLGAWWFVLVDTKTGKPVEDKVKGAEAWKEPVPLLPPQQSEDDQGAGGKARKGKPAVPADKPTANAWKTKASGGASADTWHTTATYWRNVEDAVANILQRAASESDDSLPF

SEQ ID NO: 1478 - protein, 1473 aa, unidentified
  REGION 1..1473: note = Cas Enzyme sequence
MPQQAKPPVTQRAYTLRLRGAGPSDISWRKALWQTHEAVNKGAKAFGDWLLTLRGGLDHTLADAKVKGEKGNPDRDPTDEKRKARRILLALSWLSVESKLGAPAGFIIASGTEAAEDRNGKVVAALEEILKSRNLAENEIDEWKNDCSASLTAAIRDDAVWVNRSRAFDDAVESVGCSLTREEAWDMLERFFGSRDAYLAPAKVTEDESSEEEQEEKAKDLVQKAGQWLSSRFGTGKGADFSRMAAVYGKIAAWADNAQAGTTGNQAINKLAADLSEFTPASNDLQGVLGLISGPGYKSATRNLLNGLATKTTVTQQDFGSLRDKAADDAQKCKQNTGSKGQRPYSDAILKDVEAVCGFTYLQQDGGAARHSEFAVILDHAARRVSLAHTWIKRAEAERRRFEEDTQRLANVPGPVKAWLDSFCSERSATSGALEPYRIRRRAVDGWKEVVTAWSKSSCSTSADRIAAARALQDDPEIDKFGDIQLFEALAEDDAVCVWHKDGDAAKAPDPQSLIDYALAAEAEFKKRHFKVPAYRHPDALLHPIFCDFGKSRWDICFDVHKNVQTPFPRALCLTLWTGSGMVSVPLCWQSKRLARDLAIGSNATNAGYVEVARADRLGRAASNVTKSDEVKISGLFEQADWNGRLQAPRQQLEAIAVVRDNLSLSAQERERRMSSMKDRIRWLVTFSAKLQPQGPWCEFAKTNQLRIDPQYWPHADSNKTRKGQARLILSRLPGLRVLSVDLGHRYAAACAVWEAVNAEQVKKACQVAGHEAPKASDLYLHLKRKATKRKKGNQVVVEETTIYRRIGADTLPDGTQHPAPWARLDRQFLIKLQGEEEGVREASNEEVLKVYHLEAELGRTAPIIDRLVKAGWGQSGKQRTRLEALRELGWKPASEAVVSDGMGADEGEVRKPSLSVDELMSSAVRTMRLALKRHGDRARIAHYLITDEKTRPGGVKEKLNENGRIDLLQDALLMWHDLFSSRGWRDDVARQLWDNHVAKLSGYKAPEEIGEESSGPERKKRQKENREKLHDVAKALAQDVTLREALHDAWKKRWKDDDERWKKQLRWFKDWVLPRGKHASDPAIRKVGGLSLPRLATLTEFRRKVQVGFFTRLQPDGTRAETKEQFGQSALDALEHLREQRVKQLASRIAEAALGIGRMRRPMGGKDPKRPNGRVDEPCHAIVIEDLTHYRPEETRTRRENRQLMTWSSSKVKKYLAEACQLHGLHLREVSASYTSRQDSRTGAPGIRCQDVPVKEFMRLPFWRKQIAQTEKKQAEGKGDARERFLCYLNAKWKGKSEADWEKAGVIRVPVRGGEIFVSASRDSQGAKSLQADLNAAANIGLRALTDPDWPGKWWYVPCDPASFRPIKDKVEGSAAVKPDQALRQSAQAQSGDAAKDKKKRGNKSAGKSKEVINLWRNISSSPLECIEFGEWKEYAAYQNEVQCRVIRILEEQIKGRDKQLHEGAKEDDISF

SEQ ID NO: 1479 - protein, 1473 aa, unidentified
  REGION 1..1473: note = Cas Enzyme sequence
MTTQRAYTLRLRPVDAKDDRWREQLWQTHKTVNRGARVFGDFLLTLRGGLSHELAATEDGAQRRQRGKGPEQGNADVETRRKYQRRLLALSWLSVESEEGAPSEYKLGDQESPVGALRDILSKRGLSGAEIEYWVADCQPTLEATIRDDACWVNRAEAFEHYEEAVGGCTEEEVWDFLAFFLGTPSRYTAPLAPLPGSTKHSEGEDEEDPRQVSQDPGKTRARDPDQGPKDLVQKAGQWLSARFGTGKGADFTRIADAYRRIAEWATHTDPSSLSSGAKALLALAAHLGVSVRKGDGLTAVLSLISGPGHKSKTRNRLRNINAQHRPVNTEDMASLAQDAAADSGDCRAKVDRKGGRSYADRILRAVEQATGMSYLQSGGPARHYEMAVMLDHAARRVSVAHTWIKRAEEQRLKFERDRTKMSEVPEDARRWLDEYCERRAQESGSLERYVIRRRAVQGWREVVAKWASLSRQNQEGTDSQEQRVEAARQVKGELEDKFGDIALFEDLAEEAALCVWQRDGQPVADILLHYVGAANAEANMTRRKVPAYRHPHELLHPVFCEFGDSRWQISFDVHKSRRTTARQAKSESQARSSHGLELRLWDGSGMCQTRLLWHCKRLVQDLALSQGAAEAAGPEVSRADRLGRAAAGASSGPVSLQSIFDQKHWNGRLQAPREQLEDLHTYVEKHGWDEKARRRLRSLRWFLTFSPRLTPCGPLFELAEHQQLKVSAKSGRLQLMREATQVRIGHVPGLRVLSVDLGHRYAAACAVWETVKADQVNADCRKAKKEPPGEEDLFLHLRIPRAAKSGKHRTVIYRRIGANKLADGSLHPCPWARLDRQFLIKLQGEDEPARWPCPDEIEYVDQLFEDLKYIPWWRSKPTGEIDRPRRLRVDELMSEAVSACRRGLSWHGRVAVLAHCLIATHKSLSGGRTEELTEKTRREELTSALMSWYQLACGGGSWAPDETARKLWEQLRNALPADMKLPDLSQEYNSDDEENRQARKRRQDQLRASLAGAAAALAGDFNLRSRFHKLWSQHWSENDKAWRARLRQLRRWILPRPSHLLDFPRETQLDKRSLTREQRNELLKRVRNVGGLSLTRLATIRSLYQVQKAYAMRPHPEDPRRNVPQKGDTSLDRFGQRTLDTLEHMRENRVKQLASRIVEAALGIGLEQPDLKRKRGGRAPSRPRCRRFAPCHAVVIENLEHYRPDQVRTRRENRQLMTWSAGKVRKYLEEGCFLAGLRLCEVYAGYTSRQDSRTGAPGIRCSDVPPEWIVSKSGPPWVRTRVESAVKGAGKSDATPADQYLADLYSYLANLPEEKRLAAVRIPDRRGDIFVSADPAAGRGIQADLNAAANIGLKALLDPDWEGAWWYVPCDPSTYRPKPSEWLDSKAIDTETPLRQAAPRRLEVEPASKRGRSGRTGRGKTPKSDTVNLWRDVSCAPVRRDHGPWCEYGAYWGDVEQRVVRLLRERAGLGDP

SEQ ID NO: 1480 - protein, 1473 aa, unidentified
  REGION 1..1473: note = Cas Enzyme sequence
MPQQAKPPVTQRAYTLRLRGAGPSDISWRKALWQTHEAVNKGAKAFGDWLLTLRGGLDHTLADAKVKGEKGNPDRDPTDEKRKARRILLALSWLSVESKLGAPAGFIIASGTEAAEDRNGKVVAALEEILKSRNLAENEIDEWKNDCSASLTAAIRDDAVWVNRSRAFDDAVESVGCSLTREEAWDMLERFFGSRDAYLAPAKVTEDESSEEEQEEKAKDLVQKAGQWLSSRFGTGKGADFSRMAAVYGKIAAWADNAQAGTTGNQAINKLAADLSEFTPASNDLQGVLGLISGPGYKSATRNLLNGLATKTTVTQQDFGSLRDKAADDAQKCKQNTGSKGQRPYSDAILKDVEAVCGFTYLQQDGGAARHSEFAVILDHAARRVSLAHTWIKRAEAERRRFEEDTQRLANVPGPVKAWLDSFCSERSATSGALEPYRIRRRAVDGWKEVVTAWSKSSCSTSADRIAAARALQDDPEIDKFGDIQLFEALAEDDAVCVWHKDGDAAKAPDPQSLIDYALAAEAEFKKRHFKVPAYRHPDALLHPIFCDFGKSRWDICFDVHKNVQTPFPRALCLTLWTGSGMVSVPLCWQSKRLARDLAIGSNATNAGYVEVARADRLGRAASNVTKSDEVKISGLFEQADWNGRLQAPRQQLEAIAVVRDNLSLSAQERERRMSSMKDRIRWLVTFSAKLQPQGPWCEFAKTNQLRIDPQYWPHADSNKTRKGQARLILSRLPGLRVLSVDLGHRYAAACAVWEAVNAEQVKKACQVAGHEAPKASDLYLHLKRKATKRKKGNQVVVEETTIYRRIGADTLPDGTQHPAPWARLDRQFLIKLQGEEEGVREASNEEVLKVYHLEAELGRTAPIIDRLVKAGWGQSGKQRTRLEALRELGWKPASEAVVSDGMGADEGEVRKPSLSVDELMSSAVRTMRLALKRHGDRARIAHYLITDEKTRPGGVKEKLNENGRIDLLQDALLMWHDLFSSRGWRDDVARQLWDNHVAKLSGYKAPEEIGEESSGPERKKRQKENREKLHDVAKALAQDVTLREALHDAWKKRWKDDDERWKKQLRWFKDWVLPRGKHASDPAIRKVGGLSLPRLATLTEFRRKVQVGFFTRLQPDGTRAETKEQFGQSALDALEHLREQRVKQLASRIAEAALGIGRMRRPMGGKDPKRPNGRVDEPCHAIVIEDLTHYRPEETRTRRENRQLMTWSSSKVKKYLAEACQLHGLHLREVSASYTSRQDSRTGAPGIRCQDVPVKEFMRLPFWRKQIAQTEKKQAEGKGDARERFLCDLNAKWKGKSEADWEKAGVIRVPVRGGEIFVSASRDSQGAKSLQADLNAAANIGLRALTDPDWPGKWWYVPCDPASFRPIKDKVEGSAAVKPDQALRQSAQAQSGDAAKDKKKRGNKSAGKSKEVINLWRNISSSPLECIEFGEWKEYAAYQNEVQCRVIRILEEQIKGRDKQLHEGAKEDDISF

SEQ ID NO: 1481 - protein, 1473 aa, unidentified
  REGION 1..1473: note = Cas Enzyme sequence
VPLQVNTNSVGYFWTRPNVQTALSLKPCAAHSDPQMPLAEQVRRWRRLSGFDASDGNGWPPEVDFKTNPNAVTRRYTKLLIALGLWPSAEGIVAGEKQAAKGKRIRDAASKLGTRIVEPPEVVAIVDDLLAACWEKAMEEDLHVRKPVWANGVDEQFRKSCAIAGMRGSPEYVYLMFALAARRISQTQSWTKINERERHEAAAQEDEALRKLQKVDPDGRAREWLKHYEERRFASSGATSAFRVTKRMIGECDAVLKAWEGTATSEERDAKTALVQERTEKFGDASLYADLASESGAEAIWRSSDGAEILKEWVRFRGAQYNQERLKVPRFCHPNPFLHPTWCEFGGATTKGDDTNKPSKPQVWYAWRDDIPPKPEPGGNADGLRRLWVLLPNFDSKEAKPGPMRWRSKQLSKDLGGLRDTVAKQIPRADRLSVAAAGLPHCDAAHRPIRYRPEFPFSSDAKGWNARLQADRDALRNLEKQWDADHDCWRDEGKALRAMRWFVTFSPKLAASEGPGRAVDPKLGWRSSPHTDLNKRQNREGRAKLILPRLAGLRVLSVDLGLRHAAACAVWQTIANKEFEEECEKARTCGAEIRFGPRSVAGEAPDPENALYCHLVWAEKESNSATPTAKAGHREKFHPVTVYRRVGPDKLGGKDHPAPWARLEHQRQFVIKLQGEGRPAREASNEEIWLVHQLEKEMGLAAPLIDRLAQAGWGKTRKQPHRVHALRKLGWCPSTNSELALANPERANARRPPDLQVDALMSATVQVARQALRRHNDRARIAFGLRSDYKPMPGDKKYLFSPRAGDYDGFPDKPEQRLARHTEYLQDMLCLWYELAVSPKWRDDDALSWWNGEILPLVRKAAFTEPPALASADQKDSAKRQRHEAKISRWRNAWDRVLTQELSRPAEEAEDQRDARQRKADREAMHGLLRPVAEALRRDPPLRERLAAKWADRWTRDEGRRRWNDPDPAKSDFHPVPRTDCRGKRASTMAARLDGGGWHARLRKLANWLVPRGLRTRFEETADERITRTGKVGAARNAGGLSLTRIDALVEFRRALVALRTGGTPWGRVEIGADGSVTAGPREAGESYARRLLDVIAQLREQRSKQLASRIIEAALGVGREHLMPTRKRPDKKCWCGEVHHNKKTPKRPGDRQYDACHAIIIERLDNYKPDEVRTRRENRMLAAWRKAELKKRLREGCELHGLHLRDVPAGYTSRQDSRTGAPGIRCEDLAVDEFLRDPSGEPSWIVRQAVARMLDEKASESGSDPFDERFERASKEAALGKGKSLDRYVVKLYGFWRNRPHSAQKTVRLPRRGGALFVSAGSDYPAATGKGLQADINAAANIGLKAIMDPDWPGAWWYVPAALDAAGWRVPAARTCAGAAWVKEWKVAKHGDGYSPAGQPPKPADPGAAPGATAKEKKVVNLWRDCISSDVPHFASGDAWREYAAYKADVECRVVRLLLEQAPAAEELRNGL

SEQ ID NO: 1482 - protein, 1474 aa, unidentified
  REGION 1..1474: note = Cas Enzyme sequence
MAEPTTRAYTLRLRRAPRACSQCNKDDCSCWLDVLWATHEAVNKGAKVFGDWLLTLRGGLPASLADDHPDRRVLLALSWLSVESPPSLAPATHIIARASDADRAEKVVRRFREILARLNIDNAQEWVEACEPALTARIRDDAVWVDRSAAFAALQGQFPGLTAQWAADTLFGFLGNSDDYFALPDTETKAAPESKDFVQKAGGWLSHNWGAGENSDAAAISKCLLRLAGIEEARIVGKSGRDTLAALLETLTSDSSPAPNARKLFKQLKQAVGWKGRSSKGVLALEKIRDTDTVSAELWQQTVAKLLDESAVQAAKSTASSDRPGWMQDWREWMDDHLGIPYRVNRDLKKEHSVMLDHALRRVSAGHTRIKRAEAERRRFKEDAAKIDAVPEEARAWLDAFCERRAARSGALGEYIIRKRAIDGWEKVVNAWAALPDNATRRDRIEAARDVQANLDENEKFGDIQLFAGFSDDDDESPEPCLADDGALCVWRHPDGCVDADILKNYVAAKVAKHDQGRLKVAAYRHPDPLRNPIYVDYGNSRWSISYSALKAATDRRKAIAKLTSAKPEQAKEKLRSQLAGSPELRGVSLGVWNGQTVAPLPLRWQGKRLWKDLDLKHFAQEATGNAVARADRLGRIVADQRHDTPVPIADVFQQEYWNGRLQVPRDQLDRLADLVYGKTNRKRNDPDYTKLAGIFSNPKAVRQWKQLRWFLTTSAKLVPQGPWLDYVAAGLPEGIAYKKGRNGYYLHYAVNQGRKDRAQLQLARLPGLRVLSLDLGHRYAAACAVWETVTSDQMGEACRAAGHPAPTADDLFVHLRRPTSKLQKSGRNKGQPVVETVVYRRIAADVLPDGSPHPAPWARLDRQFLIKLQGEDRPARPARQDEIDRVNEFRQFLGRPVLAAIPRIDDLHKETVRLARRGLRRLGDMARIAYAMTAAKKPVSGGREVELNAQQRTGYVLDSLVLWHNLAASGQYKAPWAQHLWQEWVVEKLGGPQVVVVSDDEPASQRRRRDNAIREMLMPVAEKLADRTGSHAGELHRRWAAEWEKRQQEWRKHLRWLRRFVLPRKSDVNGDIAKLRGLGGLSVQRLQTIRDLYQVLKAFRMRPEPDDLRRNIPEAGDESLAKFGRRILDQLERMREQRIKQLASRVVEAALGAGRMQQSLGRDRKRPQQRTDRPCHAVVVENLEHYKPEDSRLRRVNHQLMNWAARNVRKFIMEGCQLHGLFFAEVSARWTSRQDSRTGAPGIRCEDVSRKVLEEAARRAIAGSPADSAPATRFERDVRRWMHEMARVLAVANTAELKPRERVLRAVVQSLSSLPTNRSVVRLPRRGGEIFVSSDPSSPLAAGIQADLNAAANIGLKALTDPDWEGAWWFVLVNPASGEVIREKVQGSAVWSGDRTIRLMAPEADGSPENTTARRHTGRRASRQKTAVYAFNPRLSCGSSSGEWMLTRPYWKTIERQVAEQLALNQSQLALPF

SEQ ID NO: 1483 - protein, 1475 aa, unidentified
  REGION 1..1475: note = Cas Enzyme sequence
MASTDQNLVPTTQRAYTLRLRPAYVSDDSMEERKRKVTEMQTALWATHEAVNRGAKVFGDWLLTLRGGLDHNLATARVKDKKSERDPSQQDIKNRRILLALSWLSVEDEHGAHDHPEYIVAYGEGCRRQQDNQDSRDRKVLAALRDILVERGVSDEEIGNPEVPSTWLGDCKQSLSAAIRPDAVWVNRSAMFQQGCAVFQGLDSHYATETILSFFGPSEEYFKIADDSAEEEVSSSDNDGADFRQRARQWMSINFGTGKKSDTSKIGTALEQLANCNLNGFAGATKSKLIAHLLMELGADNADCSEEKLRVAVGWSTGRPSKGRLAIQNLPNTPTDEALRVLQKKFAEEAAEKLGSASSRNIPSWIAQFQEHVEGLLGVPYVCARNLIGEYSVMLDHAARRVSIAHSWIKRAEAERRSFEASARKVQDVPEATRMWLDEFSEFRSGTTGAAGYYRIRPRAIQGWDVIVQRWFQEDCITEQDRIDVARVIQADWDDEKKFGDIQLFEALASEEATLVWKVGEKPDPSLLLAYVVARDAEARQIRFKVPAYRHPDPLSHPVFCDFGNSRWSLKFAIHEFRKSQTKNKRKKEPLNNLHDVQMGLWTGQSIEAMPLHWASRRLIADFALNSTITGDATPVSRASRLGRAAAGASQDVTILNVFEEDDWNGRLQAPREQLDRVAALRSHNKHVAAARLQNSLRWFLTFSPRVQPTGPFHEFANENGIKPNKKGEYYPNADLNKARSGKAKAILSRLPGLRLLSVDLGHRFAAAGAVWQTLSLAEFSREIDSARSQGARIEGSPQGLYVHIIHKREKTDKKRNKVKTIKESTIYRRIGTDEIVDRSNGELIAHPSPWARLDRQFLIKLQGEERAARHATPDEEKFICQMEHTLGRVRDKNDKDDALPREVDDLQWEVVRTARLALKRHGNRARIAFAMTADYKPMPGDRKYFFEHEHRETWDQNDGPEQRRQKHIEFLQDALNLWHQLSTSSSWQDEAAKLLWETHIASLPNYQQPEGLPDDLRGAERKKKRGENLDRLRPTAEALLNDPSLRVELHKLWCQRWDANDGEWRKYLRKLQDWIRPSKNVAEKSIYNVGGLSLQRLATLTELRRKVQAAYFSRLHPDGHKELLKEQFGQRSLDALERMREQRVKQLASRIVEAALGVGRKQEDEKRRPRIPRDPSCHAIVIESLRHYRPDDLRTRRENRALMDWSSGKVRKYLEESCQLHGLHLREVPPNYTSRQCSRTALPGIRCEECTVEQFKTSPRWKKIVEKAKERLKKGGSDEDRLLADLWAKFEDVTATDSRKKPIRLPRAGGDLFFAAPSYEHLERLERHAPCMAEDCELCNSTRCAIQADLNAAANIGLRALLDPDFPGKWWFVPCGVKDGKPAQDQVKGSACFDNPEIELLKIGEKSNEKKKSKDRKDVVYAWRDPSGGGLQSAHSWPGTTEYWNMVKSRAIRALRLYNGLAPKANSGKSRDFA

SEQ ID NO: 1484 - protein, 1475 aa, unidentified
  REGION 1..1475: note = Cas Enzyme sequence
MIYNVKLKKLTNSSDVFSLFSRKYSLSKTLKFELKPTAETKQHLQDFIVSDTKRAKEYKELKKIIDEFHKDYIELTLSHKNILDKDKLTDFCKLWSDNNLLDEIKEKHNLKEKTKEEVIKKMEQQFRKDIVEQFKTLNPLLERFFKTADEEQLLGFLKKLDNKLWTKFKEKKEKALLDEYLQEPIKQKNIEKSILFSSELIKYLLPVWLKNSQLTDKEDKQKIIKNFGRFTTYLTGFNENRKNMYSVEEQGTAIAHRIINENLMKFLGNLQAYEKIKSSHPELQQSFKNMKSDFKEEFDYFSLENIEDLFKPEFFNSCLSQKEIDFYNTLLGGKTVEDGKKLQGINEYINLYRQKKKSEDIDIKIKYSNKNLPTMELLYKQILSDRESHSFILAEFENKKELLEALKSFWSVLFEEKTYQDYFHTKKKTSLWNNLHSLLTGRSYYDLEGAYFKSSELNKLSHNLFKDYRIITEALNENYDKIKVTLESYKKVLKKEDKKEFEKNIKSLKGFQTEWKKILSFEKNKEELKFSDEILASYFEFPIDKKTKKKNQKDFYSLQEIKDHIELYSKESDELKEDLDNLKKKLKDYKKDNIISSWFKYQFESKQNLDFFLQRNHEKENEDKREQNKNSLFSHIENHYQKIQNLSLDEKEFKKEEVEDIKFFLDLILHVLHLMKPFYLEGKASNLLDKGINNEIEVLYKKLKPIEKLYNQTRNYIAKKKSRYNKVKINFEDSTLLDGWDLNKEKDNLAVLLRKKDAVIGWKYYLGVMNKTTKDLFDYHIKLDDSEKVKQKKEELQDLILHRENDGNFYEKMNYKLLPDPSKMLPKVFFSKKNLDSFKPSEEIVRIRDNKTYAKNGGQDFSKADCHKFIDFYKESLKKHKEWNDFFKFNFSPTSQYNDISDFFQEVKNQGYNLQFDKIKSSYIEEKVKTGELFLFEIYSKDFSTKSKNRKNSKDNLHTIYFKGLFEKENLKDTVLKLNGKAEIFYRKATKKFNITHKKNTELENKNKNNPNKHSIFNYDLIKDKRFTEDKFFFHFPISLNFNSKGMKSYLFNQEVLKCLKGNKEVNIIGIDRGERHLAYYTIINQKREVLSQGSFNKMESSYKDNSGKEVKIEKDYHELLESKEKERDKSRKEWNKIENIKELKSGYLSYLVHKISKLMIEHKAIVIFEDLNLGFKRGRFKFEKQVYQKLEKALIDKLNYLVFKDKKSSELGGYLNAYQLTAPFESFQRMGKQTGYLFYVPAYYTSKVCPLTGFINLIYPKYKNVKESQQFFEKFDRIYFDKNKNYFVFEYQDKKVNPSKKTESIETLWKVCTHGEERYKWDVKDRKMIEVNVTENLKKLFEEHKIEYRQIADLKSTITKQEKKDFFSKLIDGLKITLQLRHINPDSKDEKEKDFILSPVADESGRFFDSRKAKEGEPKNADANGAYHIALKGLRTLENITSDKKDKLKLQAITNKDWFSFLKENSNKKIPKVG

SEQ ID NO: 1485 - protein, 1475 aa, unidentified
  REGION 1..1475: note = Cas Enzyme sequence
VAETTKRAYTLRLAAGAARDAIWRTHEALNNGTRAFGDWLLTIRGGVPAPRDVADARARRLLALCWFSVESAASENERFRVPHEDRQGGQGGRFAIATAIESAFRCCLASKGIDERDRDGWWADCRPALTARIHDDAVWVERWRMFEEKLSAKPEPKKVDEILRKLVGRSYIRPAQSSDADGEEEADAEEDERELDPTKTARNLCCQWFGKGKGVDFAEAAGAYEALAEFATKRAMEPPESAEKLKEAILAFRKDRGWRDLKLKTRGRGSDKVVISVEEPMIGGPGDSLANARKLWNECLLAVRADSPDERPSPSAGDFLDPNAWEKIASSAREKAAEKAARVDSKGETPWGRHLLASVENAFGAKYADDSGGKANTDFFYVMFGLAARRLSQGHSWIRRAEAARDAAAERERKGAARFTAAGPREAMTWLDGYLDERGRRQGAVEPIRIRREAISGWEAVVAEWSRKECVTALDRIEAIGKLQDGAEKFGDASLFKELAADQAICVWRDSTNSGAPDPTLLSDYVAWKQAEYDARRFKVPRYCHPDPLDHPVFGEFGASYLPIRFGWQAAPASTDLATVTRVSLLLLKAESGAQLERDIRWQSRRLLHDLGFGATREAEISRATRLGHAAIGESPTSDNAARPAALFGSDPKPWNARLQARREELAKVAWLERQVRDSRKRTSGPRAGTAYSQDDVRAARERIRWFLTFSPDLVRTGPWLRYVEREEVRRVLSADDAPVRYNRKRKTWTVPTGKEAPGWIVRPGLGVLPGVRVMGVDLGHRHGATCAVWQQVSSDDVAAAAREANLSPPGPEVVSFRCREGTSDGGHGRQLLFRRVGDSQWARLERRFAIRLPGEEREPRRLFDWELAWIFEFIEGLGYAFPRDEDESPEQARERWLAERHVRSNVARARIEILRIAERALRRHGDLVRIAHAMTSPALPGAGGTLRPVTEEDRVAHVTRAMALWDGLVQSDRWKPSDAIIELWRSKIVETCPGLSEWVKIDDEASPQERKAARAKRESLHQEIAQVLAPDERLRHTIASTFFEAWRAEDAKWKIRLRALADWIARGRRPTRGPDGKPQPMTTAERRFVGGLSIDRIDSLERLSRLQRAFSQRPDETTVFHMSKRGDTPARAVRDKMERLREDRLKKLANAIAMSALGLVGTEADKRARIEKAHHAGPRFAPVEAIAIESLRHYRPDAARGREENRRLMAWSARELAKRLGEACDLHGLLLVEVTPSFTSRLCSHCGGPGIRCEDLQRKYLDRYPYWRRERARALKRAESERDALQAWLAGINPKELPEETIRIPKPGASVFVCANDTCDLGRRGDKGGPAGLQADLNAAANIALRAMMDGRAETSWVYLPSQDGRPALAAESLRKAPEALRSIVLVSPNSPPVQTAKANAKKSRRAGAAGAAPPTFPYLFRDVSRSVPLANARWEPATAFFNFARKRVVERLQAMARTARGASDKQPATPGPA

SEQ ID NO: 1486 - protein, 1477 aa, unidentified
  REGION 1..1477: note = Cas Enzyme sequence
MTQNYQPKMTQRAYTLKLRGKDPVDTAWRDAVWRTHEAVNKGAQVFGNWLLTLRGGLDHRLAEDTADRKLEETERKNRRIMLALSWLSVESERGAPKKYRVASGTDLAKTRSDMVLKAFVEILRKKGLDDPEIEQWKRDCASSLEAAIREDAVWVNRSQAYAELAFPVSDKDIWDLLERFFGTPEAYLKAMKSPDEEGEDGVASGTTEEKAKDLVQKAGQWLSSRFGTGAGADFARMAKVYDAMAAWGTAAKEGHSGTETIADLAQWLSEFKPESDDVTGVLNLISGPGYKSATRNCVHELGGAATVDRSLIEKFCDLATKDAENSRAKTGSKGPLSYANAILENVEGVAGFTYRSAKDGTPVSVRDYSSFPEDYKWGTARHSEFAVILDHAARRVSLAHTWIKIAEGERRSFEENAAKISSVPENIKQWLDSFCEERSKYSGALDAYRIGRRALGGWKEVVAAWSKPECQGCEDRIDVARTLQSDPEIKKFGDIQLFEALAQEDALCVWHKNGDVEKASDPQPLLDYAAASDAEFKKRRFKVPAYRHPDALLHPVFCDFGNSRWEIRYNVHKPKGKASQTLPQDQVRGLSMNLLTGTHIKALELKWQSKRLAQDLAIDQPDGEGEVVQLSRADRLGRSVGGAGKDNKIQIIDLFGQKDWNGRLQAPRRQLNAMAAVRDNPKLSDEERRLRLEKMQEQLQWLITFSAKLQPQGPWHDYRKKLQLKGQPDRFPFAEENKGRKGTQAKLILSRLPGLRVLSVDLGHRYAAACAVWETLSSEAMTKACAAAGHKPPAQTDLYLHLKEPSALQKKGLKTARDRTVVYRRIAADLLPDGKVHPAPWARLDRQFLIKLQGEEEGVRKASHEEIGMVNWIEYTLGRTSPLIDKLVASGWGSTNKQKMELDAWKKQGRWIPSEQDTTQLSEEERITKPSLSVDDLMADTVRTMTLALRRHSDRARIAHYLITHEKTRPGGQKLPLDDKGRVDIIVDALVLWNNLCTMRWWKDEKAKTLWSNPILPLAPDALKKIDEEADLKRSRNQDKKRREALKPTAEYLFSNPALAEEIAAHWKKRWGEDDELWKKLLRSFGDWILGKHKGGNHPALHKMGGLSVKRIATLTEFRRKVQVGFYTRLRPDGTKRETKEQFGQKSLNALEQLREQRVKQLASRIAEAALGVGRIRRAGLILDPKRPQTRVDATCHAVVIEDLTNYRPEQTRTRRENRGVMAWASSKVKKYLEEACILHGLHLREIYPAYTSRQDSRTGAPGMRCQDVPLKDFIGSAYWKNECLGAGKKKDSPRQQYLMDLYKKWELKQDAAAADKVTLRVPMNGAELFVAADPASPAATGLQADLNAAANIGLRALLDPDWPGRWWYVPCSAKDDKPDSKKVGGSEVFKGDLVLPKQGDDDLDATKGTAKKPAAAKDIVNLWRDASALPVAAEEAGLWRSYQDYYKDVEKRVVRILQEQMDATWKAFVDEEDIPY

SEQ ID NO: 1487 - protein, 1479 aa, unidentified
  REGION 1..1479: note = Cas Enzyme sequence
MSQQVKPPVTQRAYTLRLRGIDPSDTSWRKALWQTHEGVNKGAKAFGDWLLTLRGGLDHTLADTKVKGGKGKPDRDPTDEERKARRILLALSWLSVESKLGAPVGFIIASGTEAAEDRNRKVVAALEEILKSRNVATNEIDQWKNDCSASLSAAIRDDAVWVNRSKAFDEAVKSIGSSLTREEAWDMLERFFGSRDAYLAPAKGSEDESSETEQEDKAKDLVQKAGQWLSSRFGTGKGADFCRMANVYGKIAAWADNAQADTTGNDAINNLAAALNEYSPEPNDLKGVLGLISGPGYKSATRNLLNQLAAKATVTQQDFVSLKDKASNDAQKCKQNTGSKGPRPYSDAILKNVESVCGFTYLQDGGPARHSEFAVILDHAARRVSLAHTWIKRAEAERRKFEEDAKKIDQVPKAAKDWLDSFCLERSGASGALEPYRIRRRAVDGWKEVVAAWSKADCKTAEDRIAAARALQDDPEIDKFGDIQLFEALAEDDAVCVWHKDGDAAKPPDPQPLIDYALAAEAEFKKRHFKVPAYRHPDALLHPVFCDFGNSRWDICFDVHKNVQTPFPRALSLTLWTGSGMVSVPLCWQSKRLARDLALGQNAQNDGSSEVTRADRLGRAASNVTKSDEVKISGLFEQEDWNGRLQAPRQQLEAIAAVRDNLSLSDQERERRMSGMIDRIRWLVTFSAKLQPQGPWCEFAEKIQIGINPQYWPHADTNKDRKGHARLILSRLPGLRVLSVDLGHRYAAACAVWEAVNAEQINVACRAAGHREPKASDLYLHLKRKTTKQKKGDQVEFKETTIYRRIGADTLPDGTPHPAPWARLDRQFLIKLQGEEEGVRAASNEEIWAVHRLEVELGRTAPLIDRLVKAGWGQSGKQKTRLDALRNLGWAPANEVQGSDEMDEGEVHKPSLSVDELMSSAVRTMRLALKRHGDRARIAFAMTAAYKPMPGDRKYYFTEAKDASANEDATARNGKHIEFIQDALLLWYGLTSSRGWRDDAARQLWDDHIAKLSVYKAPEEIGEDASGVERKTKQKENREKLHDVAKALAQDVNLRKVLHNAWKKRWEKDDERWKKQLRWFKDWVFPRGKHASDPAIRKVGGLSLPRLATLIEFRRKVQVGFFTRLQPDGTRAETKEQFGQSALDTLEHLREQRVKQLASRIVEAALGIGRVRRPLGGKDPKRPDVRVDEPCHAIVIEDLTHYRPEETRTRRENRQLMTWSSSKVKDYLSEACQLHGLHLREVSASYTSRQDSRTGSPGIRCQDVPVKEFMRSPFWRKQVAQAEKKGDAHERFLCELNAMWKDKTVADWEKAGAVRVPLKGGEVFVSADRISPSAKGLQADLNAAANIGLRALTDPDWPGKWWYVPCEPASFRPAKDKVDGSAVVNPGQPLRQSAQAQSGDAAKDKKKRGNKGAGQSKEVVNLWRDISSSPLECIECGEWKEYAAYQNEVQYRVIRILEEQIKGRDRQPHEGSREDDIPF

SEQ ID NO: 1488 - protein, 1480 aa, unidentified
  REGION 1..1480: note = Cas Enzyme sequence
RLVSQYPHAPFHKATSISELLSKTYGWLAAGEDKPTSASLLTTYRILFQQAAKGESDEDQSAALENLKSFAGTWIAILCNENGDTTIPGQGVFDKLHRQFRTDKFSSAGDIWKTVQKLVEEALLQKNEADTIWRQREGAKIKDKNAKAKTQKPDEKIAALCKEQWEEKSKEDRESLKKLFLKAFSGEKTKKYCSFSPEAIASAVEEIQTTTADNPCFVRLRFGARDNSMEQPLFRYFWFRQDPKFGEVATKDLLEYVAEENPEAEILDDGGISIRKMPYQRTGKEPLFPYFTNCLGIKHKERAAWFDFDKSAFKRAAEEVFKYKLRTDEREKLKAERKQKVDALKLEIQGDPREALIEKLLAKLGGAIGYGMRRATIGGWADLRQDFLKIAKRDGEQIDEDKLLAAIETAREGSGGGFGSGALFKELCEEEFHPLWLDKWSDMQPHHPKNFVRWWVLYSEAKEELEKIWDKENGQAKPIAFTWPSTKNRHRKTSFRPLDFDLQVEPTPKLDLFDREAEGQEIKLVQTNAAPPKKKKAEKGESDTAVKLTDDADNPLYPLTISYRRFKRDRIANADGNSVEAEFAPPLVAIDGKEKPSFHKPGNKKPLESSASLLPADKDGCWHFMFSFKLEQEMQKKLTGDAVKIAGEKSVRIVKKSGKWIGLNFRWPIDAKTEKKKTEEVVPTIGNEIEETDAKFNPKKIWCADKFEPFHILSVDLGVRYAGAWCRALVKIGRDSDRPNQRTISSAEHPQEIVFDARDFGTFRLQGEDAKIWRKDKHKGFSDAPELEKCGSRGRIASEIERAEFAQLAGTIFAATKRFPIPDDPSELKFFPDLGGHLVYRMSRLLGRVRFLFKLRWQISGTKKKVGHEYKVLAGDEQKEFRGEQHFNAIVSLAFIPKEDKPDETEENFMRELRLSLSPDEIWSMQTYKHDGESYPLFSKVKGGHSKEDKDKAKKRKAAQKAAQSDLKKELASNNTSKWNWSALAKAADNELQNIMRTFVSENSLIGQVAHFVWPLENKRWKWNNCTHDKEGNIVQSFLERDENSSTPKRFIHGMRGLNMKRICLMQDFRQCCQSLAKLERRFYTEKDNGLEPSPVKLGDRNHEPSQAFIDKINELRDQRVNQTAHMILAEALGLELMNPAEVSIDGKSKWELKSERDLHGRYKQKKPRVAVIVLEDLSRYRTSQDRSRYENSQLMEWSHRAIIGKLQDMAQIFRIQIITVDARFSSRFCSRTGVPGVRCAQVAQGFEKEYPWKKWKDEKDSKQQPTERAKMIGLAAEKLNLCNNPKVTLILPMDGGPAFFPVLPHAPNKEGLEANADIGAAVNIGLRPMAHPDRLDIFPVLRTEAKGDGKLEIKNWRGSLNGTAVQTVETPARKKVDEENEVSAEDDKGGDEELESGKHPRLFAAVEVGGNFSVPVENKCRYELPMTFDGRKVTSGGVSAAKGKDYWHRVKTLCWERIRKINAQRLRALKIEPPDEWKS

SEQ ID NO: 1489 - protein, 1480 aa, unidentified
  REGION 1..1480: note = Cas Enzyme sequence
MPSAPHIPLTQRAYTLRLRGVDPQDKSWRDALWATHEAINHGAKAFGEWLLTLRGGLEHTLADEPLKVGKGKPDQAPTTDERRNRRVLLALSWLSVEDERGAPKVPGLIVAYGDDCKTAKDSQDGRDRKVVDALRGILAKRAMTPATVDEWVNDCEGSLKACIRDDAVWVNRSEAFDALATRWKGLTRENARPVLEEVFGSVVEWITLPAQSQEDAVDEGGGTAGAGGSGGDGNDTKIRTIARSFLSANFGTGIKSDKSRISDALTQAAHSLATFRAGSAGPAVLSHLCAEFDLLGEDDKARAEALRKRIGWTTGRLSKGRLALRTASLKDRLEREDIDLLIQKLNEEAGKKREGTARSIPPWIENLKSDAADAIGFGFVVERNLIGEFGVMLDHAIRRVSIACSWIKRAELERRHFEADANKLHQMRAQHNDAAVFLDALGRKRGGESGSTGGTAVLIRKRAVLGWKDVVAAWSRQGCKTVQDRIEAARLLQGELEKFGDTKLFEELAADEAQVVWRDAGGVADPTILERYSAGSVAEANQQRFKVPAYRHPDPLRHPVFGDFGVSRFEIKFALHERVRAAASGKRVGKADAEWHANPRNMRMALWTGKRVERVSLRWSSKRLTNNLSLGESGKCDSVVVTRADRLGRASVGKARAVKVASVFAEDNWNGRLQAPRDELKRIARLEEKDKKEQVRRLRDRISWLVSFSAKLAPSGPFIEYAAANGIEPNRKSGEYWPHSATNKDREGHHAKLIYARLSGLRILSVDLGHRFAAACAVWESLSTEQLRVATSRGKEVRGGAGTAALFVHVETENADGSPRTTVYRRIGPDTLPDGSAHPAPWAKLERQFLIKLQGEEQPPRMAAPGELAMVVGWEKTLGLQPLPESSARPCKDVAELMARAVRMFILSGRRHNDRARIAHNLTAKHRTRPGGLSEPLTDEGRIELLTETLALWHGLFAGERWTDPMAENAWNENGLPSLDLPARADDGGTSFRGPGRKAAMDAYQAKLKPHAERLASTDLSTLSKRWAERWSEDDWRWEDRGKRGGLLRELRRWITPRGLRITAVDNEATRARKAAAALRARHVGGLSMQRINTMTGLYRLLKSFKNRPEPDNLRKNIPKKGDDRLSGFNQRLLHVRDRLREQRVKQLASRITEAALGIGRIKSRHLASGAARPKSRVDAPCHAVVIESLTNYRPDELQTRRENRQLMEWSSAKVQKYLTESCQLNGVHLREVQPNYTSRQCSRTGAPGLRGVEVSAHDLLTKPWWTKAVSKAKANIEKAKKENREGAFADRLLVNAEQWALGIPQQDRRDHRNDSSHRAFHSLRIILPRKGGDLFIAASAQSNSKGRIPALQADLNAAANIGIRALLDPDWPGKWWWIPCTGGTYIPATEKTSGADVFKNIKQLPHREEAEQPEEVESGSSLAKKRRSKPAKIKEVRAVENRWRACSAEPPDKGEWMSSGEYWAKVESDVCRLLDRQTS

SEQ ID NO: 1490 - protein, 1480 aa, unidentified
  REGION 1..1480: note = Cas Enzyme sequence
VNKGAKVFGDWLLTMRGGLCHTLAEADVPGKGKKPARRPTQQEIKNRRIVLALSWLSVESKCGAPESYIVPHDSNTATGERKNWKTVEALREILRSRGLTEERAIEWADDCRDSLRATIREDAVWVNRSKAFDLAATNIGASLTREELWDFLQPFFANRHSYLEMDTVASATNGDSETDTEESKAASSDEKAKDLSQKAGQWLSSRFGTGPGADFSRFSKVYEVLATACRSIAPEVSGVEAINRLAIAIKKCSPSSNDIEGILGLISGPGYKSATRNILQQINRLQSVSEQDLSRLCDACEKDASQSRQKVGGKGSRPYADAILQDVERTCGICYARTEDHPSRHWQYAVILDHAARRVSMAHSWIKRAEEQRSKFEIEKNKLLRVPRDALAWLAAFCAKRSSDSGANDAYRIRRSAVDGWKQVVAAWAALPAKSEIAGSELRSDAERARIQVARELQDTVEKFGDIQLFEALAIREAKCVWMPDGKPDAQPLLDYVFGTDAIAKKQRFKVPAYRHPDAFLHPVFCDFGNSRWSIDYAVHRAPGKLTKARQLLEKKSAEISKAELALGKMDDALRHAAISETLQNLRAAYKQQQAEVAWLKTLQAITMGLWDGNGIQDTQLLWRSKRFGANIGQPDAVHPSPVSRADRFGRAVALAEDNVPVIPSGLFDLPEWNGRLQAPRRQLEAIAAMRDSAKLSAGEKQQLVAKRIHSIRWLVTFSAKLQSHGPFITYAEQHGFDWRYGMHGFENKSRQGLAKLILCRLPGLRILSVDLGHRYAAACAVWETLSTGQIQKSCGVAGMEAPGPRTLYLHLKQIVDGKEKKTIYRRIGADTLPDGSPHPAPWARLDRQFLIKLQGEDRDARPATSEEIAAVEHMENELGVVRQLKRKGRELLVDELMSDTLRTLRLGLRRHGERARIAFNLTAAKRIRPGGIQDVLDQEGRISLLKETLLLWYELYSGERWRDKPAEDLWNRHLQPLLGGAILPDTVDQEGNASAAKRRKQREETSENLRPVAEQIAKNDSLCRQLHVLWGAQWQTEDAVWRTRLRWMRRWLLPRGIKRDAQLRKSIRDVGGLSLTRIASFRSLYQVQKAYRMRFHPEDPERNIPKRGDSRLEGFGQRVLDAMERMRENRVKQLASRIAEAALGIGDEAGINSKDGRQKKRPTERSRDSRFVSCHAVVIEDLTHYRPDETRTRRENRQLMSWSSSKVKKYLSEACQLHGLHLREVSPAYTSRQDSRTGAPGLRCKDVTVAEFMKSPFWRKQVNTARENRGKENNGNARDRYLLWIDEKISADVTKETDSFLIPSDGGEMFVSAFEDNKAQPASRRKKPSALQADLNAAANIGLRALLDPDWEGRWWYIPCDAATLCPDAKKFIGCKAVDPSKPLRVVAEEGAMSASGIGSKKSGRKRNVATDETRIVNLWRDPSSMPVHLDASGSGEWQGYHEYKDNVQSRVIRNLKARYKQTWRQEYPFVPQDEDTPF

SEQ ID NO: 1491 - protein, 1481 aa, unidentified
  REGION 1..1481: note = Cas Enzyme sequence
MPRQDKPPVTQRAYTLRLRGADPNDKSWRDALWWTHEAVNKGAKAFGDWLLTLRGGLDHALVTTKVKVGKGKPDRDPTDEERKARRILLALSWLSVESKLGAPAGFIIASGQEAAAARNGKVIAALEEILTSRNVAKNEIGDWKNDCSASLSAAIRDDAVWVNRSKAFDEAVKSVGCSLTREEAWDMLERFFGSREAYLAPVKGSEDESSETEQEEKAKDLVQKAGQWLSSRFGTGKGADFSRMAKVYQKIADWAAACSPNKTGTDAIACLAASLSEFNPASNDLQGVLDLISGPGYKSATRNLLTQIAAKATVTQEDLTKLNETAAADKGKCETNTGSKGQRPYSDAILKNVESVCGFTYLQDGGPARHSEYAVILDHAARRVSLSHTWIKRAEAERRKFEEDAKKIDQVPNAAKDWLDQFCLERSGVSGALEPYRIRRRAVDGWKEVVAAWSKSSCGTSADRIAAARALQDDPEIDKFGDIQLFEALAEDDAVCVWHKDGDAAKPPDPQPLIDYALAAEAEFKKRHFKVPAYRHPDSLLHPIFCDFGNSRWDICFDVHKNMQTPFPRALCLTLWTGSEMKPVPLCWQSKRLARDLALGENAQNAETREVTRADRLGHAAANVPKNLPVKISGLFEQADWNGRLQVPRQQLEAIATRIAKHGFDDKAKEMRDSLQWLVTFSAKLQPQGPWCGFAATNHLKIDPQYWPHADANKARKGQARLILCRLPGLRVLSVDLGHRYAAACAVWEALTAEQVKVACQAARHEEPKESDLYLHLKRKMTKQKKGNQVEVEKTTIYRRIGADTLPDGKAHPAPWARLDRQFLIKLQGEEEGVREASNEEIWAVHQMEAVLGRSVPLIDRLVASGWGAAEKQKARLDALEKLGWKPVEKAEAQEDADAEEEEMSFRPSLSIDELMLSAVRTMRLALKRHGDYARIAYAMTAAYKPMPGDRKYYFTEAKELSANDDEATRANKHIEFIQDALLLWYGLTSSRGWRDHVAKQLWDSHITRLSGYQAPEEVGEEATSVERKNKQKENRERLHAVAMALVENEDLRETLHDAWKTRWEKDDGQWKTHLRRFKDWILPRGKAANDPTIRKVGGLSLARLAVLTEFRRKVQVGFFTRLRPDGTRIEIREQFGQSALAALEQLREQRVKQLASRIAEAALGIGRMMRPKGGKDPKRPDVRVDEPCHAIVIEDLTHYRPEETRTRRENRQLMTWSSSKVKTYLAEACQLHGLHLREVSASYTSRQDSRTGAPGIRCQDVLLKEFMRSPFWRKQVEQAEAKQADNKGDSRERFLCALDAKWKGKTVADWEKAGVIRLPARGGEIFVSADPASPAAKGLQADLNAAANIGLRALTDPDWPGKWWYVPCEPGSCRPIKDKVDGSTAVKPDQALRQPAQAQSGDARDKKKRGKKGAGKSKEVVNFWHDISSSPLECIESGEWREYIAYQNDVQSRVIRVLEKQIKGLDKQPHDGSGDDDIPF

SEQ ID NO: 1492 - protein, 1481 aa, unidentified
  REGION 1..1481: note = Cas Enzyme sequence
MPKQNKPPVTQRAYTLRLRGTDLNDQSWRDALWKTHEAINKGAKAFGDRLLTLRGGLDHSLVDTKVKGGKGNPDRDPTDEERKTRRILLALSWLSVESKLGAPENFIVASGEESAQDRNNKVIAALEEILKSRGVAENEIDQWKKDCSASLSAAIREDAVWVNRSKAFDEAVKSVAFSLTRDEVWDMLERFFKSPTAYLDPAKGSEHEYSETEKEEKAKDIVQNAGQWLSSRFGTGKGADFSRMAEVYEKIAVWAGNAQAGTTWNEAIRNLAAALSKFSPKTNDLQGVDGLISGTGHKSRTKNLLKVLAAKSEVTIQDLEILKNNAAEDARKCFQKKGSKGHLPYSDAILRDVESVCGFTYLQNGGPARHFEFAVMLGHAARRVSLAHTWIKRAEAERRRFEEDAKKMDNVPVKTKEWLDEFIRERSGFSGALEPYQIRRRAVDGWKEVVAAWSKAVCKTAEDRIAAARALQDDPEIDKFGDIQLFEALAADDALCVWHNEGNATNAPDPQPLIDYVLAAEAEFKKRHFKVPAYRHPDPLLHPVFCDFGKSSWDIKFAVHSFSKKRGRSNNRMTESNDLHAFSMTLWTGVRMQPVSLYWQSKRLARDLAFGKYVRNEGAIAVTRADRLGRAASNTSNNDLVTIAGLFEQEYWNGRLEAPRRQLEAIARYVEKHGWDDQAEKMRDQIKWFVTFSAKLQPQGPWCAFAQKLRLSINPQYWPFADANKKRKAHAKLILSRLPGLRVLSVDLGHRYAAACAVWEALSSEEVLQACRAVGHEDPKESDLYLHLKKKVTKQKKGNPVEVEETTIYRRIGADKLPDGTPHPAPWARLDRQFLIKLQGEEEGVRQASNEEIWQVHQLEAALGRSKPLINRLISSGWGITKNQQSRIEALKKLGWCPPEQPESGDVSDADEEEITYKPPLSVDELMSSAVRTMRLALKRHGDRARIAHYLITDEKTKPGGVKEKLDANGRTEMLQDALVLWHDLFSSRSWRDDAAKQLWDEHIIKLTGDKLPEEIGEDASESERGKKKKENREKLHDAAKALAEDESLRKTLHDLWKTRWEEDDRQWKKHLRWFSDWVLPRGKAADDPAIRKVGGLSLTRLATLTEFRRKVQVGFFTRLHPDGTRAETKEQFGLSTLDALERMREQRVKQLASRIAEAALGIGSQDKRHWEGGNRPRRRINDPRFAPCHAVVIEDLTHYRPEETRTRRENRQLMTWSSSKVKKYLAEACQLYGLHFREIFAGYTSVQDSRTGAPGIRCQDVPVKEFMRSPFWRKQVKQAETKLSENKGDARERFLCSLNAMWKDKAVTDWERAGVVRLPLKGGEVFVSADPLSPAARGLQADLNAAANIGLRALTDSDWPGKWWYVPCESSSLRPVKEKVEGSPAVNPTQALPQSAQKQSDGAGAKKKRKGSGTGKPKEVVNLWRDVSSSPLDDPNAGEWKEYTAYQNEVQWRVVRILEEELKGRFQRLYEGAKEDGIPF

SEQ ID NO: 1493 - protein, 1481 aa, unidentified
  REGION 1..1481: note = Cas Enzyme sequence
MNRIYQGRATHLELLSHESGETAISKTFDDKALKRQDQPLWDHHEIFQDAINYYLVALAALARDASGKHNEDSDTERLAADLRSRIEDSWDSFRSLPDARSLKKSLTFWLGLDQDGSLDDAFDIILEGNSANPATLKLALQLILDKCAGDSAIQQGGRDYLPKLTVAQTEAGKPYSGSFDFDAVAIASATGKERLAGLLHGDPSESELIGLANEMDIGWAGIKCKPDEVITGEALKERLIEAVKHQRKRFTDPQTIAEKECLIAEPNILSRLEEIASKIPALPDDIALSVNKGGNISWDLVHAAFLFRLFPSSITAAILALSVKKPKATQDGEAAKGIHFTRLGDDPVKLARGTRGYVFPAFTALNAWSPKSTGQPAWKEFDIAAFKEALKSLNQFNQKTVERNETEKYLRGRITILLGGSKPTGWKPRKTEGDELEAMPETLEPTLLSKTWELESRLTKELTDTVVRSESSNLTFGDGQVYPNRDGQWRISPASLRGFRDIAEKWNSLAEENGEFLTQGDLEQVVKEYQQNEKNKKQVGSIPLLLALCHPDFRPLWDKKNDPKQEDLPSYNRFLFQVLNLHQDVRDYHRSHEAINLTPAEPRHSRRLYMFSDITGKEKVVFRDGNIVETTLALKEGATCRKQRVRISFSAPRLFRDQILGNETSQWLQPMTAALGYEVPEAAGLSAVSLMPDFDREGNARFLLNFPKTIDESWLKKAIGKETVWAGMFNGIKGKNLHLHWPDAYKKKSGQSAWWERKPFQQNGFWILSIDLGQRTAGAYTRIFITAKKPGVEERRPWHILGEAGGHTWYAIVGNGGMLRLPGEDQKVRQRERDQNGNTIPGSTTLARELSGSAGRNATESEYEAAINLAKKLRAEDSDFSEGSDAAAKAWVGGNEKERSFPEQNDSLIALANRRLSRLNTFHRWSCQEAALADEAKDDQSKIRVVAALLAELSHWSDESVTSWHQELHENHPYLDELFSAPETDPKTGKKTRLSESKKASSKWSDKQRKLWEDNFDPAHFTNFSQSAGEAYSELRDELQTVLLELAHRSAPLRGKKWIWETRKQDDANKAAYGFLEWLPEKGVKAPKIRGQRGLSMQRLEQLESLRTLFLRYNRSLDKIPGERSKIGFGFSNEAGEPAELLLRKIDRMKEQRVNQTAHLILAQALGVKLREHEIPDEERKSRDIHGEYEKMEKYDPVEFVVIENLDRYLTSQGRAPSENRRLMKWAHRAVRDKLKMLCEEPFGIPVVEAPAAYSSRFSAKSSEPGSRCRESCELSLFFRERLKSKAEAKPVPGRKDLRELYAKLLKQFDALEEQNQKRETGKKPHTLLLPQPGGPLFLGSVSGGLVQADLNAAANVGLRALASPGALHLLHKIRTEQKKGVVKPVLKNAREKSAFSNSETAISLQGNPSQKLQKAAKPNFFHLPKSAIGSDWYDLATLEIEGKSCHLVSGIALHTVTDDLVLKRIVEINETRLSKNNVAI

SEQ ID NO: 1494 - protein, 1481 aa, unidentified
  REGION 1..1481: note = Cas Enzyme sequence
MARRSASTSKPPGPVAPTTQRAYTLRLRRAPGKCPHCEQDACDCWREALWATHAAFNRGAKAFGDWLLTLRGGLSHELAEQPSPPKNKEPTCEESDAIRKNRRILLALSWLSVEDDCSAPTGTFRVASGKDSEAERKNKVLTAFRSILTARRMRSQDVESWIADCAASLSAKIREDAVWINRSACFDQRALDLKVLSREYAKAAVMSFFGPLDEYFKLPDEADDTKPAVGGDGPDFRTLARQWVSTNFGTGKKSDSEAIAQNLRKLADANLAPFSGKPKAALIAHLSVELDGSTADIDGLCRAIGWNTGRPSKGRVAIERLPDPPTETSIQTMQQKFREEAEAKASSKGLRQVPEWMPAFQKSIERDCGMPFKLGEGRDHIGEFSVMLDHAARRVSIGHSWIKRAEAERRRFEADAQRLNHIPAAAKDWLDQFVQFRSGSSGAAAAGGEYRIRRRAIEGWDEIIKRWKRAACKSPEDRVAAAREVQADPEIEKFGDIQLFEALAADDAECVWRGDGNGTPDPLKDYVAATDALDKMRRFKVPAYRHPDPLAHPVFGDFGNSRGDIRFAVHEAAKATRGTKRIAKDQKEWIRERHGLRMGLWDGQSVRTADLRWSSKRLVDDLALRNHVTTRRTGPVSRADRLGRAAAGLGADEAACVAGLFELPDWNGRLQAPRAQLDAIAACVAANGGKWDDKARKLRDRIEWLVSFSAKLECCGPFMEYASQNGIQPNGKGEYYPHAERNKGRTGHAKLILSRLPGLRVLAVDLGHRFAAACAVWEALSKIAFDAETKGREVVSGGRAADDLYCHTRHLDCAGKARTTIYRRIGPDKLPDGSDHPAPWARLDRQFLIKLQGEERPARAAGPAETAAVQQIETDLGRARGQEDLPPRPVDSLMREAVRTIRIALRRHGDAARIAYAFKPGAKRLKPGGGAQDHTPETHADAILEALLRWHELATGARWRDPWAETQWKDWVQPHISATLPELANDADRWERKRHRAALEQVLRPVAQMLIQRPTDALHQVWSKHWADEDLKWPSRLRWLRNWLLPRGPRARSGAARNVGGLSLLRIATLRELYQTQKAYAMRPEPDDPRKRIAGRNDDRYDELGRSVLQVIERLREQRVKQLASRIVEAALGVGRAKPTRGRQRPQSRVDVPCHAVIIESLRNYRPDELQTRRENRAIMNWSAGKVRKYLEEACQLHGLHLREVMPNYTSREDSRTGLPGVRCVDVPVDPKLGKPKAYWWNSVLSTARKKSIGDAASHDKQGDATSRFIVELAGCLDRLKADGKPLPKTVRVPRIGGDLFVAAPPTSCTAPAHQPHPACDGARALQADLNAAANIGLRALLDPDFPAKWWYVPCIDDQRGLALPRADKVLGSACFPGDPATFGSLLKTRTAAGPAVDGQAAPDRKPRTGTHRPGSAKSRSLGDGKATTNYWSDRSARDLRPADEGGHWQPTNVYWNWVRKRALLGLYSFNGLSPPSDDRP

SEQ ID NO: 1495 - protein, 1482 aa, unidentified
  REGION 1..1482: note = Cas Enzyme sequence
MKDFNQFTNLYQVSKTLRFELQPIGKTAKTFEKWLKQMDMTKDVENLFAKDKRIRDAYLVIKPIMDKLHEQFIEVSLSSSEAKKIDFLKYFEIFGDKDKEFPDGFEKGLRGEIGATYSVAGRKFSSMINEALKNPKEDKGDTESKDNEDNELTEDSKDKKKRKKKPFECLTDAKMFHYLSTNVKVLAEQNGIEEQTLNKHIEQFKGFWGYLKGYNQSRENYYETDEEASTSVATRIVHENLPTFCNNAMRFEKHKEEYLGIYRYLKDNNHETKIKNAAGEEVEAEAISEVVFQIQHFNICLSQTQIEEYNRIIGNYNRLINLYKQARRNAKIDEFEKLYKQIGCGKKKSLFAAIIKDKDSELTDDEKKKGGILTVEQLLNKAKQAGDRMFNDDSDKLEIHTVPAFIRFLKECDNWDGIYMSKTAIRKISNLYFANWHSIEDRLVSWYNDKNLKKKVETCITYDEKREEPLKLRDAVELSVFLMVLDKEQSKHFFKESLFKDDETNEYRGVLDKSFTPSKNLINLLCSDIERNIKLFKEGSNSGVASDKRKSDNKESSEDKYGNFVPWKYDEEKNNQSGKDAPTGENNHTIENIKDWFDAATNAMRVVRYFAVRKSKMKGNIPNVAMEQALSNLLYNDDAQWFKWYDLVRNYLTKKPQDDAKENQLKLNFDNSTLMDGWDMNKEQANATVILRKNGMYYLGIMNTEYNHIFDKENVSSNGDCYEKMDYKQIALSRGVGAFVRKCFGTAQKCGWYCPNYCLNEEGKIIIKDDEAQSNLKAVIDCYKSFFDKYEKDGFKYKDFNFCFLESDKYEKLSDFFTDVEQQSYMIKFRKISVDYINDLVNSGKLYLFKIYNKDFSTGKDGGNGSTGKPNMHTKYWEMLFDTNNLKDVVYKLNGHAEVFMRSPVAENAPITHSVGSKLVNKKDKDGNTIPDQTYRDIYAYANNNTMNISDEAQRLIDQKKAVIKDVKHKITKDKRFYGDTKYMFHCPITINFKAKEYKEPKYAYPEVNGKITDTLQQSENLQFIGIDRGEKHLVYSCTIDKDGKIIKGKCHHHDIISVIKKDKDGKDVEHKTDYVQKLEAVADERIIAKKNWQQQSRIKDLKSGYISHVVHSLVEETIKDGETIAPHAYIVLEDLSTEMKRGRQKIEKQVYQNLELALAKKLNYVVDKTAKHGELGSVNKALQLTPPVSNYQDIEGKKQFGVMLYTRANYTSITDPATGWRKTIYIRNGNEEDIRKQVLDYFSDFGLEGKDYYFEYIEPNAGHPWRMYSGKDGEPLPRFQNRKQLKDDKNIWVPEQINVVEILDNLFAKFDKAKSFKEQIEQGAEPKRIESRNETAWQSLRYALEVIQQIRNSGEKNSKNDNFLYSPVRNDNGDHFDTRNNNIGDLSQIVDADANGAYNIARKGLIIDAHIKEWIKNGRPKISDKKDEKTSDLDLFISDREWDLWLLDKDQWQKELPIFASRRAKEDVKKPQTRKSRKRKH

SEQ ID NO: 1496 - protein, 1482 aa, unidentified
  REGION 1..1482: note = Cas Enzyme sequence
MAKAIELPTTQRAYTLRLRGNTPQDCTWRDALWATHEAVNKGAKVFGDWLLTVRGGIDHSLADGPIKQKGDTTRSPTPQERRDRRILLALSWLTVEDALGAPSDEALIVARGTDNPEARMQKLVAALDAILTARGVTATERGDPKRLAADQRGTWLGDCIPSLAAAIRDDAVWVNRSKAYDHVQEQLAMSRDEIWDFLEPFFSGVDAYLAVSQSETAQDDVPATNPPEKAKDLCQKAGGWLSKRFGTGTGANFRQMANVYSAICTWAGQHKAFDAGLRAIESLAQSLNSFSPAPYDAKGILKLISGPGYKSATQNIIAAWAEFEGPITAEAIARLGENAGNDRHKCITKSDGKGKRIYSDTILNTVETACGFTYLQDHGPARHREFSVILDHAARRVNVVHSWIKNAEAERRAFENDSTRITQVPEPALLWLRNYCDTRGNISGALDSYRLRRRAIDAWDKVVERWSHSGCQSKEDRIAEARQLQDDPSIDKFGDIQLFEALADDDAFCIWNLPEGPNPQPLKDFVAATEADDKKRRFKVPAYRHPDALRNPVFVDFGNSRWHIDYSAHRRPVKSSQLREHLAVHNATVCEIREKMLRATEGRKASLMKRLEDAVAQQRECEQAVTELDDHYRVIMKLWTGQAVATVPMHWSCKRLTADLAIRNRPAVSSDQPDGVSRADRLGRAANHVGPEDSVTILGLFEQADWNGRLQAPRDQLDRIARHVDKHGWDAKAARLVGRLKWLVSFSAKLTQQGPWTKYCQLFDEDCQSLPFISRKGDCAVKHDTNDSRHGQARLILSRLPALRVLAVDLGHRYAAACAVWEAITTTQLQSECQSAGVKPPDSLAMSIHLKRTTAQGKTTTTVFRRIGSDQLPNGDPHPAPWARLDRQFLIKLQGESRSARAASVEEMHRVEEFETWTGLQRDQTTPPRTRAVDHLMNQTVRNARLALARHGRRSRIAFQLLSNVRILPGGRRQALSDVGEFDLLLDTLLEWHALATDARWSDSPARQLWNSSIATLDGGFAVAAVSSIDRTLGERRHEEEVLRRQLAPLAAQLQTNRDLRHKLHASWSERWTSDDQQWRRYLRWLARWLLPRGGSRQDGGRRHVGGLSLGRISTLTEFRRKVQVAYFTRLKPDGKCAEIGRFFGQSTLDAIQRLKDQRVKQLASRIVEAALGIGCEKKSANGRDLPRQASVGAAPRFAPCHAIVIEDLSHYRPEETRTRRENRNTMDWKSAETRKRLSDHCQLYGLCLRDVAPHYTSRQDSRTGAPGLRCVDVPVADFLSQPWWRKQVLLAQKRAVANQGDARDRYLLSLEQRWAGASEVDCAKAGALRIPMNGGELFVSADAQSPLAKGIQADLNAAANIGLRALTDPDFPGKWWYVPCDATTKEPHPEKVKGSILAGIGPLAPCDPKAAESGQSMRRKRSSKEKSIVNLWRDPHAGPIEGAAGLEVWTVTPAYWNLVKVRVIENLSKSVNGEPGELSGR

SEQ ID NO: 1497 - protein, 1483 aa, unidentified
  REGION 1..1483: note = Cas Enzyme sequence
MIKSEQDKQKSIWDEFTNLYSLSKTLRFELKPVGADGKRLSPEKASDLLGKIIEQDKKIKTAYTALKPVMDRIHESIINGSLTADAAKKIEYTDYFKEYLKGKEKSLDELENSLRKQIGATFETTANAFAEKANIQNEELEKLRSNSNDRQRKKTEKDEETSKPILKSKNSKPAGIEYLTQAGILKYIENNISDLVSAEQVPEFINKKELIDAKGKKSTETSGYLADFKGFFTYFSGYNQNRENYYESDKEASTAVATRIVHENLPKFCDNIIQFSIGKTYKTRNSSGVAEVTISRKEEYLNALDYLKNNGRTTQIKDAETNKYIEALPISEDWFTIHKFSECLSQFGIEKHNKVIGHYNLLINLYNQARKNEPEFRKLPPFKTLYKQIGCGKKKTLFTELKYDTEAQQRDANDKSEDVLNLEGTLKLISDAGVRYFTKDSDSKDRVTVHTFLEWLEQNDGWTGIYWSKAAIDKISNRYLANWHEIKDRIQETLEGTNKELKEKLKSVASYDKKREEQLKINDAVELSGLFEILNQSGEIRLKDFFKESVFEESSAIIDENISPAENLINLICADIEGFALKFLEQSPSILAISDYKNENNILTIKEWLDTAKSLLWLIKDFEVRESKVKGNQVNPELANMLVALLHSSDADWFGWYDLVRNYLTKKPQDDVKKNKLKLNFENGSLLNGFVDSFSDSDNATQYGGYIFRKSKSSSDNINYDYYLGISKNSKLFRCHLQNKIKGNDKSNFERLEYYQAKSTTYFDDNYSANKASLIEKIEMLISKITKGKPDLAEEAKKIIKKNKYGEITPTSLLDKIQKSKNKEFQSILTDQPLIAILSKSIEELKLNTENFISRAPQLQDIINTDYNGIDGLKRIIGDFQKIARENKIYNYFAVSKAEFNAAIQDTEKPLYLFKINNKDLNNNETHQRKINHKGIENLHTLYFRALMREAGSIGTIDLGKGELFLREKAIENKVIHYANQPIFRRSDGKTESRFSHDIIKDKRFTEEKFLLHLSATLNFNPTKKNVTEKVNDHFSESPDIRFLGIDRGEKHLIYYSLVDFNGKIIEQNHLDVINKKDYLQAITEAAKTRKEKQLNWQQKGNISNLKDGYISLVVHEIMQRLKDKDDLKPTFIVLEDLNTGFKRSRQKFEQQVYQKFELALAKKLNYLVYKNAPSGEIGSVEKALQLTPPVTNYQDIENRKQIGIMLYTRANYTSVTDPVTGWRKSIYLKKGSEESIREQIFSVFDEIACNSEGDYYLQYTDKNSGREITLWSGNGGKALERYRSVRGKDKNEYHIESYNIKEILDTIFKDYDKNESILQQMKDQKELKKVDKEKNSWESLRFVIDLIQQIRNSGDPEKGQKDNFLLSPVRDINGNHFDSRIYENVENPSLPKDADANGAYNIARKGIIMYEHIKQWVKDGKTEKDLNLYVSDSEWDLWVSDRKKWQAELKYLASKKAKESYGESRLQLPKQTGKTMLNKKRS

SEQ ID NO: 1498 - protein, 1484 aa, unidentified
  REGION 1..1484: note = Cas Enzyme sequence
MPDEALVNGSTAGTDLMVVTQRAYTLRLQGVDPQDHSWRDALWKTHEAVNKGAWAFGDWLLTLRGGLDHSLADAKVKGGKGNPDRDPTDEERKARRILLALSWLSVESKKGAPEKYRLDKQSSARSNLNPEEALREILKGRGLGKSEIESWVQDCSASLSAPIRDDAVWVNRSKAFDDAVKSVGCSLTRDEAWDMLERFFGSRDAYLAPAKGSEDESSETEQEDKAKDLVQKAGQWLSSRFGTGKGADFSRMAKIYEEIANRAGKAQPGMTGDKAIADLATALSKFSPTSNDLQGVLGLISGPGYKSATRKLLKRFRDKTPVTQEDFQNLQDKAREDAQKCKNKTGSKGHRPYADAVLRDVESVCGFTYLQDGGSARHSEFAVMLDHAARRVSLAHTWIKRAEAERSRFQEDAKKVDQVPEAAKKWLNNFCLERSRAAGALEPYRIRRRAVDGWKEVVAAWSKPDCKTTEDRIAAARALQDDPEIDKFGDIQLFEALAEDDAVCIWHKDDDPANPPDPQPLLDYVAATDAEFKKRHFKVPMYRHPDELLHPVFCDFGNSRWNICFDVHKNTKTPFPRTLCLTLWTGSEGMKPVPLRWQSKRLARDLAFGQDTRKDGASDVTRADRLGRAASNVGKNDAVNIAGLFEEKHWNGRLQAPRRQLEAIARYVEKHGWNEKAKNIRDAIQWSVTFSAKLQPNGPWCAYAKEHGLRKDPQYWPHTEVNKDRKGHARLILSRLPGLRVLSVDLGHRYAAACAVWEAISTRQFQQNIEDKKILRGGTDAESLYCHTEHTTDGKKHTTIYRRIGADTLPDGKPHPAPWARLDRQFLIKLQGEAEGAREASNEEIWAVHKMETVLGRSVPLIDRLVAAGWGSTEKQKARLDAIKKLGWVPIKRADASEDADTEEEEELAFRPSLSVDDLMSSAVRTMRLALKRHGDRARIAFAMTAAYKPMPGDRRYYFTESKDLSATEDATARNSKHIEFIQDALLLWYGLISSRGWRDEAARQLWDDHVAKLHGYKAPEEIGEDVSGAEREKKQKENREKLYDVGKALAQNESLRKTLHHAWKTRWEEDDGRWKKQLRWFKDWILPRGKYASDPSIRKVGGLSLTRLATLTEFRRKVQVGFFTRLKPYGTRAETKEQFGQSTLDALEHLREQRVKQLASRIVEAALGIGSENKQHWEGGKRPRARSKDPRFAPCYAVVIEDLTHYRPEETRTRRENRQLMSWSSSKVKKYLAEACQLHGLHLREVSAGYTSRQDSRTGAPGIRCHDVPVKEFMRSPFWRKQVAQAEKKQDEGKGDARERFLCVLNAKWKGQPEADWEKAGAVRVPLKGGEIFVSADQNSPAAKGLHADLNAAANIGLRVLTDPDWPGKWWYVPCDPVSFLPVKDKVEGSAVVKPDQPLPKSAQAQSGDGAKDKKKPGKRGASKSKESKKVVNLWCDISSSPLECREEWKEYAAYQNEVQSRVIHILEKQIKRLRQATARGVQ

SEQ ID NO: 1499 - protein, 1485 aa, unidentified
  REGION 1..1485: note = Cas Enzyme sequence
MSQNPAPPVTQRAYTLRLRRGPGKCPACQKDACDCWRDALWATHEAVNRGAKAFGDWLLTLRGGLCHTLADIDVPAKGKKPARNPTKQEQRDRRVLLALSWLSVEDERGAPNGDGLRIATGKEPADKRGEAVKAALRNILGNRGVNASEADSWVKDCEASLAASIRDDAVWVNRSAAFDAACNGQNLRQAREDARTLLWYLLTDDYLVLPKANKKESEDTGEDQEEGQDEESAVDEAAEAVAKSAKGAGQRTRHLFSHIFGRQSTQGFGKPPCQLDLRDYWQGHLKPLIEAAGIPLSDPNVTAKKGAAPSPTELHREMFSKAASRLAQIWTKQKQQEVARQLRAAADDELKELESDQTYSKALDLLEAYCRERGQITGSLEEYRINPRAVEGWERVVAAWEGIKSSDPTEAQQRRIDEVKRLQDESDDKKFGDNNLFVSLAEPEYEPVWQHKGQATPSVLKTFVKGWKARSDAARLKVAAFRHPDPYSHPVFCQFGVSRPWIKHGRLDPKGNAGTVQMLLWTGSKADKVQISAVSKRFDAEIGSASESTVIAARQVARRHRLAVAAVSTSGAGVNTIRVAHVFDQQEVRSRERAVEHGIEDENGDDESQNARKKGPIWNGTLQADRQALKAIGKLASSQKAPQAYRCLQWRLTVALELQSSGPWYDYVRNATDQSPFQRTVRKDEDKGKKRKKGTKYLFLDGWPFEEVNNPLKVNRVDTLLLADKRSARGREAKIVLSRLPGLRVLSVDLGHRYAAACAVWEALPNAAFKGEVAGLKVRAGGPGEDDLYLHVEKPGDDGKTKTVIYRRIGPDSLPDGQFHPAPWARLDRQFLIRLQGEDEEAREASNEEIWKVHQLEAELGRTVPLIDRMEKGTFGQTEKQKQRLEALRGLGWTPATTNVPPGAAGEEEGETRIVSRSVDELMFAAVRTMRLALRRHGDRARIAFAMTGDHKPLPGGRKYYFDEAKGASASDDEATRRSKRIEFLQDALALWHDLFSSRGWKDDAAKKLWEQSVATLSGCQTPEEIAEDLTAIKRKKKREENRDRLRAAAEARAAAEALAAAEALAADDRRRKELHDAWTKRWELDDAQWKRRLRWFKDWVLPRGKAGNDPGIRHVGGLSLTRLATLTEFRRKVQVGYFTRLHPDGMKRETRESFGQATLDALDRLRDQRVKQLASRIVEAALGIGRIKTPKGGKMPKRPGKAVDDPCHAVVIESLTHYRPDDLRTRRENRQLMTWSSSKVKKYLAEACQLNGLHLREVPAGYTSRQDSRTGAPGIRCQDVRVKEFMQSPFWRKQVAQAEKKRADGKGDARERFLFDLNTKWKSQTEAAWESAGSVRIPLKGGGLFVSTDPRSPAANGIQADLNAAANIGLRALLDPDWPGRWWYVPCKAGTSEPASERIKGSAAFKNVRGLPADGADRAGSEASTGQPRKNKGGASREIENLWRDPSSEGLAAGHWKQTQAYWNDVQYRAVQLLRKRARLDSDG

SEQ ID NO: 1500 - protein, 1488 aa, unidentified
  REGION 1..1488: note = Cas Enzyme sequence
MAATPTTTRAYTLKLGGHGNEDWRDALWTTHLTVNRGVQAWGDWLLTLRGGLPASLADGHPERQVVLALSWLSVESPAELAPQEFLVADGTQSSEERAEAVRACFVRVLQQKGVSEDQHANWLANCEAALEAAIRPDAVWVNRAGVFAECSSQYGIPSDSETIWDLAGRFFSSLNAYFELPKLDSSQGGLGDEPEMVKQALGWLSNRFGDDDAGADFEALSQSYKRIEDGLHCVDPGSGDAVLRQLSASLGVAPNLNAVLKTVSATGHKSATRNLLKELHAQPRVSEGDIARLKEIASEDAAKALESVGRKGHREWADQILQDIEDRSGMPYANGTKSPNRSEYSVMLDHAARRFRLAHTWMKRAEAQRRAFDVAREELSNVPEDARNWLDQFCVDRTQVSAAADAYLIRKRAIDGWAELVQRWSQSGCVTEQDRIDAARELQSDPEIEKFGDIQLFEALAADEAACVWNANRRPDKDILRRYVEARQAEHDQRRFKVPAYRHPDALRHPVFVDFGNSRWSIDYAALAAAREREKLLAQLEKADTDIKRRNVQLKLAATPDLHAVTLGLWTGEGIESVPLKWHCRRLRNSLDLNHFDKIGPTVSRADRFGRAIADAASAAVSVAEVFQQKDWNGRLQAPRRELDQLADYLARQGLPLDDRTQWDERARKLWDRLGWLLSFSARLKPQGPWLDFVEQGLPDGVSYRKGRTGYFLAQEANKTQKRKSRSYLQLQRLPGLRVVSIDLGHRVAASCAVWETVSAADFDKRRREADDAFVRRDGELGGADLFCHLRFPTGRLSKQGEPLFRIEVYRRIGPDQLSDGVPHPAPWARLDRQFLIKLQGEDRPVRAATADEAQRVAGFRSWLGLPNEESPFLSSLRANEVEDQLAAAFDGDVSTSAGTQKKPRLPRVDELMADSVRLAQLGIRRLGLLARIANSVTATERPGMGGVVLPLSDAERIELLQGQLASWFDLAHSSRYQDAVLRSLWYEHIAPLLDGEELTPVDENATRPEQKKQRESLKVRMRRAAETLAGRDNADLFELLKAEWQQRAETWQKQHLRWLRDWLMPRGGKSQAKNKALRHVGGLSLQRIQTLRSLYRVMKSFHQKPTPDDLLAGKKLVEEDAAKGRRFGQRMLDAFEQLRENRIKQLASRIVEAALGIGSENRAHWDGHKRARQQIKSQNVAEATRRRFKPCHAVVIENLERYRPDETQTRRENRQLMDWSARNVRKFLMEGCELNGLYFAEVAPQYTSRQDSRTGAPGVRATELPRRVLAEAASLWLRTPCGQPLDVETASEKCQRSVRFWKGEIERAEKRLARKEKSPRDQYLVDLARKAHAEPGGQHATVCIPRRGGELFLSAEPATDWHSGILQADLNAAANIGLRALMDPDWPGAWWYVPAQLQDGRYVPAEKKVTGLPKKLFDGWALGQEGKGFSIDAPAMTSATAQKNPNLWRDVSDLPLTDGEWLHRKVYEPQVEARVLKRLRKLAGLDG

SEQ ID NO: 1501 - protein, 1489 aa, unidentified
  REGION 1..1489: note = Cas Enzyme sequence
MPDEALVNGSTAGTDRVVVTQRAYTLRLQGVDPQDHSWRDALWKTHEAVNKGAWAFGDRLLTLRGGLDHALADAKVEGGKGKPDRDPTDEERKARRILLALSWLSVESEKGAPEKYLVPHDLDKQSGARSNWKTVDALKEILKGRGLGKSEIESWVQDCSSSLSAPIRDDAVWVNRSKAFDDAVKSVGCSLTRDEAWDMLERFFGSRDAYLAPAKGSEDESSETEQEDKAKDLVQKAGQWLSSRFGTGKGADFSRMATIYEEIANRAGKAQPGMTGDKAIADLATALSKFSPPSNDLQGVLGLISGPGYKSATRNLLLDRFRDKTPVTQEDFQNLQDKAREDAQKCKNKTGSKGHRPYADAVLRDVESVCGFTYLQDGGSARHSEFAVMLDHAARRVSLAHTWIKRAEAERSRFQEDAKKVDQVPEAAKKWLNNFCLERSRAAGALEPYRIRRRAVDGWKEVVAAWSKPDCKTTEDRIAAARALQDDPEIDKFGDIQLFEALAEDDAVCIWHKDGDPANPPDPQPLLDYVAATDAEFKKRHFKVPMYRHPDELLHPVFCDFGNSRWNICFDVHKNTKTPFPRTLCLTLWTGSEGMKPVPLRWQSKRLARDLAFGQDTRKDGASDVTRADRLGRAASNVGKNDAVNIAGLFEEKHWNGRLQAPRRQLEAIARYVEKHGWNEKAKNMRDAIQWSVTFSAKLQPKGPWCAYAKEHGLRKDPQYWPHTEVNKDRKGHARLILSRLPGLRVLSVDLGHRYAAACAVWEAISTRQFQQNIEGKKILRGGTDAESLYCHTEHTTDGKKHTTIYRRIGADTLPDGKLHPAPWARLDRQFLIKLQGEAEGAREASNEEIWAVHEMETVLGRSVPLIDRLVAAGWGSTEKQKARLDAIKKLGWVPIKRADASEDADTEEEEELAFRPSLSVDDLMSSAVRTMRLALKRHGDRARIAFAMTAAYKPMPGDHRYYFTEAKDLSANEDATARNSKHIEFIQDALLLWYGLISSRGWRDEAARQLWDDHVAKLHGYKAPEEIGEDVSGAEREKKQKENREKLYDVGKALAQNESLRKTLHHAWKTRWEEDDGRWKKQLRWFKDWILPRGKKYASDPSIRKVGGLSLTRLATLTEFRRKVQVGFFTRLKPDGTRAETKEQFGQSTLDALEHLREQRVKQLASRIVEAALGIGSENKQHWEGGKRPRARSKDPRFAPCHAVVIEDLTHYRPEETRTRRENRQLMSWSSSKVKKYLAEACQLHGLHLREVSAGYTSRQDSRTGAPGIRCHDVPVKEFMRSPFWRKQVAQAEKKQDEGKGDARERFLCDLNAKWKGQPEADWEKAGAVRVPLKGGEIFVSADQNSPAAKGLHADLNAAANIGLRVLTDPDWPGKWWYVPCDPDSFLPVKDKVEGSAVVKPDQPLPKSAQAQSGDGAKDKKKPGKRGASKSKESKKVVNLWCDISSSPLECREWKEYAAYQNEVQSRVIHILEKQIKRLRQATARGVQ

SEQ ID NO: 1502 - protein, 1489 aa, unidentified
  REGION 1..1489: note = Cas Enzyme sequence
MPQQDKPPVTQRAYTLRLRGADPSDTSWRKALWQTHEGVNKGAKAFGDWLLTLRGGLDHTLADTKVKGGKGKPDRDPTDEERKARRVLLALSWLSVESKLGAPVDYIIASGKDAAEDRNGKVVAALEEILKSRNLADNEIGEWKNDCSASLSAAIRDDAVWVNRSKAFDDAVNSIGCSLTREEAWDMLERFLGSRDAYLTPVKGSEDESSATEQEEKAKDLVQKAGQWLSSRFGTGKGADFSRMAAVYGKIAAWAGAHSPNKDAIASLATALSEFTPASNDLQGVLGLISGPGYKSATRNLLTQIADKTIVTQEDLKKLNETAAADRGKCETNTGSKGQRAYSDAILKDVESVCGFTYRVDENGNAVSVSNYSLYGDDYNWGSARHSEFAVILDHAARRVSLAHTWIKRAEAERRRFEDDAQRMANVPGPVKEWLDSFCLERSGMSGGLEPYRIRRRAVDGWKEVVTAWSKSSCSTSADRIAAARALQDDPEIDKFGDIQLFEALAEDDAVCVWHKEGDAAKAPDPQPLIDYALAAEAEFKKRHFKVPAYRHPDALLHPIFCDFGKSRWDICFDVHKNAQTPFPRALCLTLWTGNGMVSVPLCWQSKRLAHDLALGQDVQNDGSSEVARADRLGRAASNVTKSDEVKISGLFEQADWNGRLQAPRQQLEAIAVVRDNLSLSDQERERRMSGMMDRIRWLVTFSAKLQPQGPWCEFAEKLQLRINPQYWPHADTNKDRKGHARLILSRLPGLRVLSVDLGHRYAAACAVWEAVNAEQVKKACQVAGHEAPKASDLYLHLKRKATKQKKGNQVVVEETTIYRRIGADTLPGGTQHPAPWARLDRQFLIKLQGEEEGVREASNEEVLKVYQLEAELGRTAPIIDRLVKAGWGQSGKQRTRLEALRELGWKPASEAAGVSDGMDADEGEVRKPSLSVDELMSSAVRTMRLALKRHGDRARIAHYLITDEKTKPGGTKEKLDENGRVDLLQDALVMWHDLFSSRGWRDDAARQLWDEHVVKLSGYKAPEEIGEESSGPERKKKQKENREKLYDVAKAMAQDVTIREALHDAWKKRWKDDDERWKKQLRWFKDWVLPRGKHASDPTIRKVGGLSLPRLATLTEFRRKVQVGFFTRLRPDGTRAETKEQFGQSALDALEHLREQRVKQLASRIAEAALGIGRMRRPMGGKDPKRPNGRVDEPCHAIVIEDLTHYRPEETRTRRENRQLMSWSSSKVKKYLAEACQLHGLHLREVSASYTSRQDSRTGAPGIRCQDVPVKEFMRSPFWRKQVAQAEKKQTEGKGDARERFLLKLNTLWKDKTVADWKKAGSIRIPLNGGEVFVSANPASPAAKGLQADLNAAANIGLRALTDPDWPGKWWYVPCEPASFRPVKDKVDGSAVVNPDQALRQSAPAQSGDAAKDKKKRGNKGGGKSKEVVNLWRDISSSPLECIEFGEWKEYAAYQNEVQCQVIRVLEEQIKGRDKQPHEGSKEDDISF

SEQ ID NO: 1503 - protein, 1489 aa, unidentified
  REGION 1..1489: note = Cas Enzyme sequence
MADGKPPTFPRTYTMRLCPPDEGQADRNGLWDKLFATHYAVNAGARAFGEFLLDMRGGLSPDLSRMGLDRIKDDAKRRLALAGRRRMLALGWLSVEDDHGAGDHPHALPESSGQPLPRDVAEKLLRQILETKGVTDRATVDEWCDDCLGALTAAVRDDTVWVNRAESYRNLDSGPSPDQAFKILERLLGKNFLDLSLGKETRTRDRHRGQLGTDEGEDGEDKEEWRTTAASGNDPSENARQLICDLFGTGQKGDFRKTAGFAAKVKNWVNSLGDYKNCDQPSLENRIRETFRSVFSGGEYPSFPSKELKKSRPKPTSLYPQECVSGKKPGKLARRVRKLLVYLKVWDQMPGVEDGTIRDNRLHALVNEIDSACDEEIKKDRTDLKAPSWAPALLSRLEKASGIKLASRQQGSPSAGEFRILFAVLAARRLSQTQSWTRLNEMTRHEAQSDLDSAKSEIDRLDPKGKARGLLERWEDRRRQESGTRGEYRITRAAISALDDVLEAWATSTGPEERIGLLPEVQSRAEKFGDASFFEWLARTDNECLWKHASTGAISGEIITNWVKKREAEAAISLVKVPRYCHPDPFLHPVWCEFGNSKPDVRYFLRNELGQTNKRRKNSQHSEDLRNVELLLVNDRSGTVGMERLRWASDRLWKDLGVAATQSSDALARNDRLSRAALGLSTGSYRPIYPFTGQAKKWNARLQVDRNALEELRGLWDNRTRKWTDEGRRAHQVRWFLSFSPDLKASAGPWHRFVENNRDILNDLSTRPYKDKKTDELRVPLPWGKLNRKENRKGRAQLVLCRLPGLRVLSVDLGHRHAAACAVWETLSTAQINQLCYQHHQPPPGPSSLYHVYETSIPDTDGCTGEVRKLKRLKPKQFIYRRIGPDRVNGREHPAPWARLVRQFVIPLQGEKDEPRWPTEEEKRLAHTLRLTLELPESKVERPVRFDELMSGIIDMLERGIDRHKKASRVAYNLTAREIVEPGGKLVPVDGTDRYEVISSALKDWYSLASSPGLYSNFAREIWNAKCAGLKGGRPVPAETAADEPEKVSFSDLAKGLAESEHLTRELHDLWAGKWHENQPKWRPLLKEIRRRLVPSSGFARNNKRLLRHVGGLRLDRITLFQRFHRLQLSYRDCPPPEESGIKKGAENSTHEHFGQRLLDDIDRMRENRVKQLASRIVEAALGIGREPADSKRRREQTPGRGDHAPCHAIVIENLAYYRPSEEQTRRENRQLMSWSSARIRKYLQEACLLNGVLWYEIWSAYSSRQDSRTGAFGLRCRDIPVASFVDPQGFLRDHLRRVKLANSPEATMLRELEARWNAATRVWKVSPDEAWQLSDDGRRWAWAGPKPQMVGDRRKVPDPVRIPWRGGEIFVSSNERSPAAKGVNADMNAAANLGLRVLLDPDWPGAWWYWPARLTGKGRVPVDETCKGSACFPAGYEIETGESKEETVNLWRDITCASIESGGWQEYAGYSAQRRNAVINILRKHNGL

SEQ ID NO: 1504 - protein, 1490 aa, unidentified
  REGION 1..1490: note = Cas Enzyme sequence
MAKEKANKNFNDFKNIFPLSKTRKFSLIPVLNIEQERRICIEKGYSNKDEITRQNRVEKFFKDNNQDIFNVDIERKKRYQALKYYLTELHKLFIKDSLEMIKRNNDINFSNLFELYIGYEASNNEKKRKVIGKINNEKVRLAKYFGDKEGKGGVFQKIAKRYYEYLEKNLRNNEKIKGGDDKQKFADGTKNILISQNVLMILSKKINDGSIREKKEKNQGKENEYAIKFKTKENKDQETNLVEYFGGWSTYFKNFNEIRGNLYKDEGRRQGDEGDDETGEKLVKANSGQLTTRILDENFEIFVKNAFLAEKNKIDLGLTDYQKKNVIANHNIFEPDYYANCLLQADINTYNAAIAELNKLFNEKKGKKKIDYLEPLYKQLLLSDGLEEFENGYINEFNNDSDLIEGLEKFYRHAREKLSIVGNFLKDGLINGDLDSILLKENQTHYYCNIFFGSWSYIRDLYYEQNGIGIKNRPDKKSELKDKDGRTKIEISLAEIKSILDGISKERFQEDIKNAIENAKQRSRSVFDLLGVHGSEKIYKEDKSNFENFVLFFKFYFDSLLNGRNLLTEKEKKDKEKITQIKSFLQKSKTEGERVDELLMSKFSEANYLASINASINKKQEEFENEFKDLRQSINLKKGLSRRKDFECKQAINDYCVRISDINGFFALFSIPEGIVADGDNGIIQKFKDKNEINALFGAIRNYITKKDAGNEKIKVTFDNPTFLGGWAYKTTDYCCRILKKQDNYYLLIIGKEKSKNKNDVSKQINVNSLTGYQMMDYYQQKGQTIFGSVYTGKFDSKYGDDRTKLKNSEFIKRIEQIIDGLNREFCNVQKVKMHLESLKEMIRVGKFNFGITASDFGKAFLGKTEKYYHQYKNKKGILNKEDVIISILKELFGSEMFDYGHEKDYLVNRVKEIMKEDAPKTSFLGSDLLAYEVTKLEPYYYKNNFREMDFKKDGIDEKLLDKELFIFQIYCKDFSLKRGSIIPNPKKDLNTLEFEELFSIENREKPLFRLAGQAEVFFYPQKESYKVERWSKDDLKNPKTDKIPYKKRRYAENQIIFHIPIVVNNISNGGNVDRKIHEYIQQRNDVKMLGIDRGERELAYCCLLDGKGAICGDVKSMNIVGSNIKNGIKQPINYQKKLDIREKERLMARRSWTKIESIKDIKRGYDANLMHEITTLMAQENALICLEELNRGFKKDRTRIEKSIYQQFENDLVNKLNYLVIEKSPQGVRNALQLTPPNRAQKTWGNQMGAIFYTDARYTSKTCPNCGFRHRSVGGLKTSQEIKNKIAAKELRISYDKKYDRFRIEYHWNYEFKQNSKQCEFASKDLYNGEMEYIFSDVNRSHWNNNDLKDIFKDYLIENEDLFLLVKNEPKFRYVDFGKVFVSLTWIRHSVKEGDQEYDEISCPKCHFWTRSPKVQKIKDGDANGAYNIARKGLIILDKIRSEKLRNKMNTKNGIKSKGLKINLKEWDEATYSQWDRKDWGESDNKRGL

SEQ ID NO: 1505 - protein, 1491 aa, unidentified
  REGION 1..1491: note = Cas Enzyme sequence
MADVYAQKGAQRAYTLRLTEADPSDSSWREKLWLTHEAINKGAKAFGDWLLTLRGGLCHTLAEAPVSQAKGKPDRLPTSEEIKGRRILLALSWLSVEDDHGAPPQFLVVKGSDSTDSRSRKLNEALISILQSRQVSEEDIGDAKRKPEDQPGTWLGDCLPSLSAVIRKDAVWVNRSKAFDEAAKTIGPSLTPEEAWDMLERFFGSREAYLAPAKVAENGTSAGEGEDKAKDLVQKAGQWLSSRFGTGKGANFGLMAEVYKKIAGCGRNVGSDGITGESFVIELADALKSFNPASADLQGILGLISGPGYKSATRNYLQLLAAKASVTNEERQTLCDKAQEDAEKCDKNTGSKGQREYSQAILKNVESVCGFRYLQDSGPARHREFAVMLDHAARRVSLAHTWVKRSEAERRNFEDDAKRIESVPDSIKDWLDEFCSVRTGASGALEQYRIRRRAIDGWKEVVSAWGGNSCKTEEDRIAVARELQDDPEIMKFGDIQLFEALADEDALCVWHKEGDLTKDPDPQPLLDYVLAADAGAKKRRFKVPAYRHPDALLHPVFCDFGKSRWEITFAVHKDLRPANTHALSLKLWNGSSIEPEPSLRWHSKRLVSDLALDKDVRGANTPKVTRADRLGLAAADVLENGSVGIAGLFEQEDWNGRLQAPRPQLEALATLRDNKHLSLDERLHRMFKMMSRIRWLLTFSAKLQPQGPWCELAGGLGLKADPQYWPHAEQNKVREGQARLILCGIPGLRVLSVDLGHRYAAACAVWEALTKQAFDDECRDARAKGANVVFGPDECKPEEALYAYFRWPEKQSNAATKKAKTESRAKKFNPVTVYRRIAGDALSSGNPHPAPWARLDRQFLIKLQGEEQAPRAASDNEMKLVDDLAKRLGLGVDEDRTHSRSVDELMTRAVRLTLLALKRHARRAKITYALDPVTRSALGMGGTEIAFQPGDTTHVKVLTDALFDWHSLASESKWNDTAARDLWNQHIAVVKGGWRIEEPDSQAQDTSERTRQQRRKDDERLRESLIPIALQLAKANRSCMHKAWDDRWAADDGPERVKSHFQHVPIKDANDKIVGSFTVAKMQTSGLHAELRWVTDWIMGRRLFGERRRRWTRNVGGLSVTRIATMRSLYQLHKSFAMRPRPNKPRGAPEKGESNTGVAQSILDAMKRMRDNRVKQLASRIVEGALGIGRMKRLKRGRDARRPRTRVDEPCHAIVIENLTRYRPEEIRTRRENRQLMNWSAAKVKKFLAEACQLNGLHLREVSAGYTSRQDCRTGSPGIRCQDVPVKEFMQSPFWRNQVARAEEKQAQNKGDARERFLCDLNEKCKSTPEAGPEKAKPLRIPLRGGELFVSADSKSPAAKGLQADLNAAANIGLRALTDPDWPGRWWYVPCDPISFKPLAEKVKGSTAIDLDKPLMEPAVQSTDRIKKKGGRSLSQSREVRNLWHNVSSQTISSEEGTWEVYDAYSRRVQEQVIREVLRDSAGSVMRLKKE

SEQ ID NO: 1506 - protein, 1491 aa, unidentified
  REGION 1..1491: note = Cas Enzyme sequence
MAASDIYRSYQVLIEESIDRRCAKGCSAKESKFDSQVVQALHTTNRLYQDALCYYILALAGLAKERRLNPLWEHVTPSLEMQPHTQTLLRRLAERYPRFKNVKTPEDFLRAIYSPGVSEDQLQQTYELLEQQGVEAGEDGEGRKCADLSNFASSWASILCDVTGETVIPGNGVYDDLHRRLRTASDEVIERELLAALDRAWKAHTRRREAALTSALADALANRKPKHTEAAIEGRVRRTFAKKELDQHERTRRAFLKAFEHEKTGKYRTLPGALIARAVAEINAAAVDDPRFRRLRYGERDNSFEQPFFRFLWLREQQSAREIVLRDLREYMEKEKPEPAPLLRGRPVTHMPYQPASKILFPFFSNCIGISGREAWDFDKAAFAEAAEDVFKYKLRTEERARRLADVERRRLLFENEGEYTEERMHDGRTRQIYKVRGMRGDVRLEKMRELLVELGQGLGGYSLRPATIGGWADLRKAFLKKERQQPDDLANGLVELVEKAQTESAGGFGSAAFFLKLCEEAYFDLWRSDWPDKQNFQAEDFVRHYVRYSELKREEQELRADIRFTWPGGINRFGKISYRHFDFTAALGPQIKTKLFIQNSDSNQTSPTYALTDELTLTLTGRRMKRDRLVNANGDSIDALWSPPLVSPEDPPRITAKKKKEAKPAEVSFSLMVRDGSERSADGEILHPPIYLNVAVQVTGAELKKIQGDAVKWEISMRRNRDRTGRFLRWPIDLKAEARIASSEGKPPDSKKQTAAQLWCGDGRKALSTFNVLKRDNFDILAVDLGVRVGAAFARSKIKIGGDEGRRISPDDWPMDIRAVRYRAGELRLPGEDADVWEKGEGFVREEFGRRGRFPTAPEIEDFVEFAKQIYPPSGFSLPDAQSLTYPELADHLVFRFKRRLSRIRTLFNLRWRLIGKMERNPDSEELVFNIPRTPQQQQAHHRTIVEMLGRQVVAKTKDPEFEEETWMRSLREKLAPEEKWTEAKPDLTRRKKEIAESTRQMELDRIIATWNWSALGTEVMAQTSTIFEGVSDIVEQLCLRCLPLRDKLWCWRNSNLTLEKATPDRQPKLRIRGMRGLSIVRIEQIQELRRALQSFAKLEKRLALGSKPGEAGIEPVPTRRSEVVEDACPDLLDKINELREQRVNQIAHMILAEALGKTLVDPSTVHIDGKEKSELKSERDLHGVYESIKLRDGGFAPKCALIVVENLIRYRMSQDRARFENRRLMEWSHRNVIKKLQDIAKPFRIEIVLVDAAYSSRFDSRTGCPGIRVKKITAGFEKEQPFSKWIAEKRKAKGHEAEFTERAKALREIKYVFDHGFKGELIAAVEGGPLFLPLYPVGLGEGLENADINAATNIGLRAIAHPDRLDIFTLLKTDALSEDRLRIRNNRGEFATLTAEDPAREVSLPARANIGGDQTIDAEEEDEIESGARPNLFVDVHADDLIPVAETFRVELPNAKTKWRGAKSAIFWPRVRHLANERIEMLNAKRKPS

SEQ ID NO: 1507 - protein, 1492 aa, unidentified
  REGION 1..1492: note = Cas Enzyme sequence
MNRIYQGRVSNVETANPDKNAPTEQRWLLLPDWKKQLWAQHELFQDAVNYYVLAIAAMAEGCGDAQFRETWIATAKERAVADNELDTKGRAKAVAAAEDQAVAQLKALLNWRGCVQDTWISSTRKAKSIAGPGARLGETLGWETAESGFSSATKRVLASSKATSAQRAEALLQLLEEIDKGDMNIVCGERIAFLCPASPNAKKRPTSKALSSLQEQRRQQAVRIFHQATSEQAIAAAATLDLGLFLTQPSAEFAEGADAAQMLRGYFKKAAAAFPKLDDIAAEFEAALATKQSSLKEPRAGRRTSGLYPVATVFRFFPAAETLAAFLEATATLNKGKDRLVRRDVIAEARVADCPHFEFFTNLALKRPADVKPVTRAIWFEFDLAAFLEAIKSPHRYYQDTQKREAAAEELRKKLAALEGSGGDLDDEGEEDEQEAQHGGFSGDPRIDLLAELVFHGLYVGEAEDHEEEKILRPFIREALARRSLQIDPHRAEYTIQERTLRGYAEIRKRWLAVAEKGTPTEKQLLDVLANEQGKHRDDYGSASLYQALAAPKYHPIWRESGPEKWHAKDPVTAWRTYTELRFELADKTRAIRFTPAHAVHSPRYFIIPKEGGGGSEHMAGELAFTCDIVIRTERGLAREKAKLTYSAPRLCRDRLRTLGDTDLAAAPWLQPMMQALGLPESDRQDFSNCRVTLQPTNPENIQLTFPVQAATDKLQQMLKHKDRWSYQASGKAGQKNFAQFNYSASEPRAETSLRWPSDIEFAKEAKQPRKSEPDPWHRKLDCFSVLATDLGQRDAGAFALLEARANDDFAGKPTRFIGKTGDKNWLARLVASGMLRLSGEDRREWRARSKLDDKNYRDTNSGPGFREELWGERGRRAEPVETAECAQLFADFGCEENDLLPEGWRTSLSFPEQNDKLLIAARRAQSRIARLHRWCWFLSDSKQASKVEDTFKEIAELDDARLSPPATKLLATLEQKTELLAALHHDLAERSKNLPPLLVTVANRCLPLRGRSWQWGSHPTKPDCFLLSQEGAPRPNAHPLRAVGTATDETWIRGQRGLSFERIGQIEELRKRFQSLNQTLRRVPSEPPKKRRDDTIPDPCPDLLDKLDRTKEQRVNQTAHMILAEALGVRLTPPPADKAALRASRDQHGAYVRVRSPVDFIVIEDLSRYRATQGRAPRENSRLMQWSHRAVRDKLKQLCEVFGLPVLETPAAYSSRFCSRSGVPGFRAEEVTAGFTQSGHWAWLAGKKDADGKRTEEAQQLHDLDRQLGEAQAALERNWTTKKRPQPCPKRTLFVPMAGGPVFVPVVDKVTDADLAPKIAQADINAAINLALRAIADPRLWSIHPRLRSQREGDAKPSKGKKGKLVQTTAATSAEARLLTREKRKFGEAGKPLTVHRPTDAKSDDTRQPNFFADFAGLRVIAEKRAEEKRELSWLIREWTPAEIVGETGIPPLLHGKSFWGCVKATQWERASQINRARIAAWRDKLDQMPA

SEQ ID NO: 1508 - protein, 1492 aa, unidentified
  REGION 1..1492: note = Cas Enzyme sequence
MEPTTRAYTVRLTGDDTTDWRAKLWKTHCTANRTVQVWGDWLLTLRGGLPATIIDDPTLHPVTDDAVAAMVKANNGTTVAAEALHELQQQRSQRLRVVLAVSWLSVEVGQEDDVPARFVVARSTDALQVRTAAVLRRFAEILQRKHVPETERGAWITACTPTLTARIRDEACWVDRSAAFSRLSLEFNDQLNSSWAESTFMGLIGGSTDYFASVDLETGSAADGKDFVIKAGNWLSANWGSGEKSDAGSIAGKLRQLVDAKVCGRGETAVEALAHLNKILGQSLDNSSSMDALFKSLKQTIGWKGRPSKGAMALQKIAGSGTVDSELWQAVSAKLAEEADDQAAKASSSLERPDWMDALRSFLQTRCGLPYRTTKDLIWEHAVTLDHALRRLSVAHSWIKRAEAERERFATDGSLLERMNADAVARLNIYCDFRTVESGAIMPYQIRKSAIDGWDLVVKAWSNADCDTTGKRIDAVHDLQRTLGDDEKWGDSRLFEDLASEDCTCVWRGENGRSDVEILEKFVSASAARSNQTRFKVPAYRHPHACLNPVWVDFGNSRWSISWSALEAINEIRKLKKKLESAKTDAAKKKIEQQLLAQPDLHGVSLGLWNGETVEGVSLRWQGKRFHKDLDLDHFGADGATVTRGDRVSRAAVGSGSGPVSVSSVFDKKDWNGRLQLNRSQLERLHQYLAAHSLPLANPTDWDEKAVKMWSRLNWFLTTSAKLQPTGPFLDYLQQPLPLGWSANLKKGLLSYAPNKSEKRSGRTRIQLSRLPALRVLSLDLGHRYAAACAVWETLTSDQMRGVCKAAGIAEPGPDAMFLHVEQAMPNRSTVESQTADKVKTKRTVYRRIGAETLSDGTPHPAPWARLDRQFLIRLQGEDRPPRRATGDEFNGFNSFRRFLGLNEFTAEESLDLNGSVLKTPLITDIMNQAVRVARLGLRRLSDRARIAFAMTAMEKPVSGGRMLPLNGTDRMTFLQDALLTWHQLATSSEYVSSDARELWDTWIVNRCSGPSLVMTQGEMSRPARKRSDESVRDSLAVVASQLADPSCELARKLNSLWTRNWQEQELAWRDHLHWLRRLIMPRLGQRPPRTQPEARKAWKEKILHGRRMGGLSYDRLRAFRGLYECMKAFRMRPEPDNLRKNISDTGGRELSNFGRRILDQFEKLREQRIKQLASRVIEGALGVGREVPRNLRNKTRDKKRPTERCSDIRFQPCHAVIVENLRNYRPEESRLRKMNRRLADWAAANVRKYIKEGCELHGLHFDDVPAAYTSRQDSRTGATGVRAEDVPLTVLLDAALGSLDTPSKASDTHKRAVHRWASELKRSAQRVGDDKGDARDHLLVALAAKVKNAKRAQLPDLLLLPRQGGELFLPIVAEEKAGRPRSLQADLNAAANIGLVALLDPDFSGSWWRVKVNPRTGAVANADFPGCPLFEDALILLPVDQRGGKRDRQNAFSIPSATGLQTRDWKNQWAYWPSVLDSCCARLAAWYGLDR

SEQ ID NO: 1509 - protein, 1493 aa, unidentified
  REGION 1..1493: note = Cas Enzyme sequence
MPQQAKPPVTQRAYTLRLRGAGPSDISWRKALWQTHEGVNKGAKAFGDWLLTLRGGLDHTLADTKVKGGKGKPDRDPTDEERKARRVLLALSWLSVESKLGAPEGYIIASGEEAAEDRNGKVVTVLEELLKSRNVPNNEISEWKNDCSASLSAAIRDDAVWVNRSKAFDDAVKSVGCSLTREEAWDMLERFFGSRDAYLAPVKGSEDESSETEQEDKAKDLVQKAGQWLSSRFGTGKGADFCRMADVYGKIAAWADNAQADTTGNDAINNLAAALNESTLASNDLQGVLGLISGPGYKSATRNLLNQLATKTIVTQQDLANLKDKAIKDAQKCNQNTGSKGKRPYSDAILKNVEAVCGFTYLQDGGSARHSEFAVILDHAARRVSLAHTWIKRAEAERRRFEEDTQRLANVPGPVKDWLDSFCSERSGTSGALEPYRIRRRAVDGWKEVVTAWSKSSCSTSADRIAAARALQDDPEIDKFGDIQLFEALAEDDAVCVWHKEGDAAKAPDPQPLIDYALAAEAEFKKRHFKVPAYRHPDALLHPIFCDFGKSRWDICFDVHKNAQTPFPRALCLTLWTGNGMVSVPLCWQSKRLAHDLALGQDVQNDGSSEVARADRLGRAASNVTKSDEVKISGLFEQADWNGRLQAPRQQLEAIAVVRDNLSLSDQERERRMSGMMDRIRWLVTFSAKLQPQGPWCEFAEKLQLRINPQYWPHADTNKDRKGHARLILSRLPGLRVLSVDLGHRYAAACAVWEAVAKGDFEKECSNAKGKGAEIHYGPDGCKPEDAIYAHLVWPEKASNSATKKAKTEGRDKFHPVTIYRRIGADTLPDGTQHPAPWARLDRQFLIRLQGEEEGVREASNEEVWKVHQMEAELGRTAPIIDRLVKAGWGQSGKQRTRLEALRELGWKPASEAAGVSDDMDADEGDDRKPSLSVDELMSSAVRTMRLALKRHGDRARIAHYLITDEKTKPGGTKEKLDENGRVDLLQDALVMWHDLFSSRGWRDDAARQLWDEHVAKLSGYKAPEEIGEEFSGPERKKKQKENREKLHDVAKAMAQDVTIREALHDAWKKRWKDDDERWKKQLRWFKDWVLPRGKHASDPTIRKVGGLSLPRLATLTEFRRKVQVGFFTRLRPDGTRAETKEQFGQSALDALEHLREQRVKQLASRIAEAALGIGSEGGKGWEGNKRPRQHINDPRFAPCHAIVIEDLTHYRPEETRTRRENRQLMTWSSSKVKKYLAEACQLHGLHLREVSASYTSRQDSRTGAPGIRCQDVPVKEFMRSPFWRKQIAQAEKKQAEGKGDACERFLRDLNAMWKDKTVADWEKAGVIRVPVRGGEIFVSASRDSQGAKSLQADLNAAANIGLRALTDPDWPGKWWYVPCDPAGFRPIKDKVEGSTAVKLDQALRQPAQAQSGDAAKDKKKRGNKGGGKSKEVVNLWRDISSSPLECIEFGEWKEYAAYQNEVQCRVIRILEEQIKGRHKQPHEGSEEDDISF

SEQ ID NO: 1510 - protein, 1493 aa, unidentified
  REGION 1..1493: note = Cas Enzyme sequence
MPQQAKPPVTQRAYTLRLRGAGPSDISWRKALWQTHEGVNKGAKAFGDWLLTLRGGLDHTLADTKVKGGKGKPDRDPTDEERKARRVLLALSWLSVESKLGAPEGYIIASGEEAAEDRNGKVVTVLEELLKSRNVPNNEISEWKNDCSASLSAAIRDDAVWVNRSKAFDDAVKSVGCSLTREEAWDMLERFFGSRDAYLAPVKGSEDESSETEQEDKAKDLVQKAGQWLSSRFGTGKGADFCRMADVYGKIAAWADNAQADTTGNDAINNLAAALNESTLASNDLQGVLGLISGPGYKSATRNLLNQLATKTIVTQQDLANLKDKAIKDAQKCNQNTGSKGKRPYSDAILKNVEAVCGFTYLQDGGSARHSEFAVILDHAARRVSLAHTWIKRAEAERRRFEEDTQRLANVPGPVKDWLDSFCSERSGTSGALEPYRIRRRAVDGWKEVVTAWSKSSCSTSADRIAAARALQDDPEIDKFGDIQLFEALAEDDAVCVWHKEGDAAKAPDPQPLIDYALAAEAEFKKRHFKVPAYRHPDALLHPIFCDFGKSRWDICFDVHKNAQTPFPRALCLTLWTGNGMVSVPLCWQSKRLAHDLALGQDVQNDGSSEVARADRLGRAASNVTKSDEVKISGLFEQADWNGRLQAPRQQLEAIAVVRDNLSLSDQERERRMSGMMDRIRWLVTFSAKLQPQGPWCEFAEKLQLRINPQYWPHADTNKDRKGHARLILSRLPGLRVLSVDLGHRYAAACAVWEAVAKGDFEKECSNAKGKGAEIHYGPDGCKPEDAIYAHLVWPEKASNSATKKAKTEGRDKFHPVTIYRRIGADTLPDGTQHPAPWARLDRQFLIRLQGEEEGVREASNEEVWKVHQMEAELGRTAPIIDRLVKAGWGQSGKQRTRLEALRELGWKPASEAAGVSDDMDADEGDDRKPSLSVDELMSSAVRTMRLALKRHGDRARIAHYLITDEKTKPGGTKEKLDENGRVDLLQDALVMWHDLFSSRGWRDDAARQLWDEHVAKLSGYKAPEEIGEEFSGPERKKKQKENREKLHDVAKAMAQDVTIREALHDAWKKRWKDDDERWKKQLRWFKDWVLPRGKHASDPTIRKVGGLSLPRLATLTEFRRKVQVGFFTRLQPDGTRAETKEQFGQSALDALEHLREQRVKQLASRIAEAALGIGSEGGKGWEGNKRPRQHINDPRFAPCHAIVIEDLTHYRPEETRTRRENRQLMTWSSSKVKKYLAEACQLHGLHLREVSASYTSRQDSRTGAPGIRCQDVPVKEFMRSPFWRKQIAQAEKKQAEGKGDARERFLRDLNAMWKDKTVANWEKAGVIRVPVRGGEIFVSASRDSQGAKSLQADLNAAANIGLRALTDPDWPGKWWYVPCDPAGFRPIKDKVEGSTAVKLDQALRQPAQAQSGDAAKDKKKRGNKGGGKSKEVVNLWRDISSSPLECIEFGEWKEYAAYQNEVQCRVIRILEEQIKGRHKQPHEGSEEDDISF

SEQ ID NO: 1511 - protein, 1494 aa, unidentified
  REGION 1..1494: note = Cas Enzyme sequence
MNRIYQGKVTAVEIPDGNDEQDRPKWKKLDTAESALWQHHELFQDAVNYYIVALASLGSSPESKLTRLRELLKPVWKGFDKKGQRRQGMRDSLRRAWQLEQPPTLIEAVERFRQQLMMNGVQAEEMELAGESLAIDLGGEGSIQQGGIEYWPYFCQSGFKRGVTFPREAAQLAKEKAVKQVARLVWNSKAELHVVHIHRALKQSHFCNVSGSGKVLMEDRAGEVFKDALRELKAAGHITAKQHELFSAKLESKVPEVPEYAGGSINKDALKERFYGFLIFKHLAPNIEGLRVLRSIYDEPVKKKAGKEKDLTEKEKQEARLVSLGEDPIKMVRARSKIVFRAFTALPLWGSQVVSDELYERSAYAQELIAGESHQIAWKEFDVAAFKEALKVYNQFQQNVEKREDKLNAFAAKLLVMDGERAMEAYASEMDKVLRERLEKIWRESKGKPKAPTNDSGEETSLPHFTGDARIDRLRQIINDDLAEEYRLTEGRKTAYGLRRRTMKGWGEVKRKWQSHVKSGEKFSDEKRQKLNDVLDEMRGGEKREQIGSHKLFEALLTDDKAWGIWREPDEKLQEQINKNEWASDPLEAFREYCEIREAMEEVSARPLNFTPADTRYSRRLFMFTDVCSFGKNSGDYKHDTKELAVTVPVAIRDAVGRFAIQRCRLVYSAPRLLRDRIRAEDGSYVQDWTQPMMHALFGHSDDAANPQELKDAAVQLMPDYDVKGKRRVLLNFPLSLTPKPCWEKVYENRQQKGLFAVRYSKKDKKKEKPLNGGIWESNLRTFWEGDNPKKRDFLCWPADDRKKADWSIGDWWEKLPSFRVLAADLGTRHAASVAIIKCDMERKGTARYIGNVKGKNWFAQYRSGAILRLPGENAKVLRPESPLDKDGRGKAFREELYGERGRPADEPECQETFAILSALKQSDLLKDVTDTASLQRQFSLPELNDKLLVGIRRAQGWIAACISWHWKLTQPDSEGQRKGALVQIKEQERMLDWQTLADGNEANLTKLRTVLHTHISNQRQCVQEQLLQLTKRILPLRGRLWEWVTHPEKPDCHLLRQTEEGTGTEKVKLRGQRGLSMARIEQISELRRRWQSLNQSLRREIGQKPLTASEMRNDPIPDPCPDILTKLENIREQRVNQTAHLILAQALGLKLRVPQMSVKSREITDTHGEYEVVGPPVDMIVLEDLSRYLSEQGRAKSENTRLMKWCHRAIMLKVKMLAEPFGIPVLETPAAYSSRFCSLTGVAGFRATEIGWGDRNEFRWRELLKVDLMELQVEITKAANNKTKLETLERQLAAAKATQETFRELEKIGRSPKPHRTLLAPQPGGPMFITAKEIPHPAPTEKRRQKGNIGVLPMQADLNAAVNLALRAVAHPSCAEIHHRLRSERKKAGKGQQDSFLAREKRRFGNEKIALLPEKGNDLPKEKNTNFFFDEHRVANFGRARLETDAGSSFVYASGPGLWKKVNDRVQQWERCRLINSIRLAQWSNDPEDDVPM

SEQ ID NO: 1512 - protein, 1494 aa, unidentified
  REGION 1..1494: note = Cas Enzyme sequence
MNRIYQGKLTAVEIPDGKDEQDRPKWKKLDAAESALWQHHELFQDAVNYYIVALASLGSSPESKLTRLRELLKPVWEGFDKKGQRRQGMQDSLRRAWQLEQPPMLIEAVERFRQPLMKNGVQAKEMELAGESLAIDLGGEGSIQQGGIEYWPYFCQSGFKRGVTFPREAAQLAKEKAVKQVARLVWNSKAEIHVVHIHRALKQSHFCNVSGSGKILMEDRAREVFKDALQELKAAGHITAKQHELFSAKLESNMPEVPEYAGGSINKDALKERFYGFLIFKHLAPNIEGLRVLRSIYDEPVKKQAGKKKDLTEKEKQEARLVSLGEDPIKMVRTRSKIVFRAFTALPLWRSQVASDELYERSAYAQELIAGESHQIAWKEFDVAAFKEALKVYNQFQQNVEKREDKLNAFAAKLLIMDGERAMEAYASEMDKVLRERLDKVWRESKGKPKAPTNDSGEETSLPHFTGDARIDRLRQIINDDLAEEYRLTDGRKTAYGLRRRTMKGWGEVKRKWQSHVKSGESFSEEKRQKLKDVLDEMRGGEKREQIGSHKLFEALLTDDETWSVWREPDEKLQEQINKNEWASEPLEAFREYCEIREAMEEVSARPLNFTPADTRYSRRLFMFTDVCSFGKNSGDYKHDTKELAVTVPVAIRDAVGQFAIQRCRLVYSAPRLLRDRIRAEDGSYVQDWTQPMMHALFGHSDDAANPQELKDAAVQLMPDYDAKGKRRVLLNFPLSLTPKPCWERVYEKRQQKGLFAVRYSKKDKKKEKPLNGGIWESNLRTFWEGDNPKKRDFLCWPEDDRKKPDWSMGDWWEKLTSFRVLAADLGTRHAASVAIVECDMERKGTARYIGNVKGKNWFAQYRSGAILRLPGENAKVLRPESPLDKDGRGKAFRQELYGERGRPADEPDCQETFAILSALNQSDLLKDVTDTASLQQRFSLPELNDKLLVGIRRAQGWIAACISWHWKLTQPDSEEQRKGALVQIKEQERMPDWQTLADGNEANLTKLRTALHMHISNQRQCVREQLLQLTKRILPLRGRLWEWVPHPEKPDCHLLRQTEEGTGTEKVKLRGQRGLSMARIEQISELRRRWQSLNQSLRREIGQKPLTASEMRNDPIPDPCPDILTKLENIREQRVNQTAHLILAQALGLKLRVPQMSVKSREITDTHGEYEVVGPPVDMIVLEDLSRYLSEQGRAKSENTRLMKWCHRAIMLKVKMLAEPFGIPVLETPAAYSSRFCSLTGVAGFRATEIGWGDRNEFRWRELLKVDLMELQAEILKAANNKTKLETLERQLAAAKATQETFRELEKISRSPKPHRTLVAPQPGGPMFITAKEIPHPAPTEKRKQKGNISVLPMQADLNAAANLALRAVAHPTSAQIHHRLRTERKKAGKGQPDSFLAREKRRFGNEKIALLPEKGNDLPKEKNTNFFFDEHRVANFGRARLETDEGSSFVYASGPGLWKKVNDRVQQWERCRFINAIRLAQWSNDPEDDVPM

SEQ ID NO: 1513 - protein, 1494 aa, unidentified
  REGION 1..1494: note = Cas Enzyme sequence
MPSNTPDPKVFDQFTRKYSLSRTLKFSLIPVLTEEQEEQIVKDKGYENSTQIRRQDKIEKFFIENKQNVFDVDIERKKRYKALKYYLTELHKLFIKDALGKAKEDTKLDFSKLFEAYEAFEISKDSDQRKRFAKIINDRKIELAKCFGNKDGKGGLFQTTAEYYYDWLKKNLADDEKIADDKDGKQRKNNIFLSQNVLLILDKKIKEGVIREKAEKNKDEQSSYILSEFEYLKKGKIGSGTLTEYFDGWSTYFKNFNEIRSNLYKDEGRKEEDEIKGDSEAKIKKANAGQLTTRILDENFEIFVRNAVWAKSNIRILKLIDFQSEDIINNVSVFAPEYYKNCLLQSDINEYNKKIAELNKFFNENKNSKEVKYLKPLYKQLLLSDGLEEEENNYIREFIDDNDFINGLDEFYSHSCEKISIISGFLDGEIEDDLTDIQLNENQLHFFCNKYFGSWSYLRDLYYKQNNIEERNQSKKDAELKNIEGISMIDISLWDIKTLLDNETKENFMEAVENGWFCRDYKNYAQSNASPLREYDIYKDEVGNFDNFISFLQFEINSLLNGRDLLTKKEQGDKNKIGEIKSSLEKSRDEGERVDSLLLSKFSEEYFKENLVENIEAKQKKFQQAFQEIKKSVENKEKLMRDREFECKKNINEYCDRISSINSFFALFNVPEGVAPGFINSTVAKFKDDNQIIPLFDAIRNFITKRPDETEKIKLNFDYQLLMGGWAYKTTDYKCRILKKNDKYYLLIIGNARQEDDPIKVILPEFEIMNYYQQKGQTIFGSVYQGKFEHSYDDDRNKLPNVDFIRNLDKIIDDLKVYFPKAKERLEMIKNMLSSDKFVFSISREKFLKLFKEKTEIDFSGYKNRKDLPKKEDLIIEILKGAIGDDKFDYEVDKDYLINRIKEITKKEALKTDFLGSDRLVYEITKLEPYFYENSFRPLDFYDQDSALNNRHLFLFQIYCKDFSDYRKEESAKDLNTLYFEELFSEENQKDPIFKLSGGAEAFFREEMDNNKIEQWERKDLKRPQTDKLPNKKRRFTEKQILFHLPIVLNNISDGKNINREVHEYVQTNEDVKMLGIDRGEKELAYYCLLNKDGKIVEKPATLNIVGSNIVVDGNGQEKKQSINYRNKLDVRERERMIARRLWTKIEGIKDLKQGYISNVVNNIARLMVSNNAFVCFEELNYGFKKDRSIRIEKGVYQRLENALVEKLNYLVLKKIPYEVRNALQLTPENRPIKYWGNQMGAIFYTDAKYTSKTCPHCGFRRRGVDGFKKVEDLIGKKAKDGKIEKEGKINAGDLKVFYEKDKDRFRVEYNWQYKYQENNEEKELSSKDLYGGKMETIYSDIDRQYWNDATLKELFKQYLDSDNEELFCRVRNDKSFKYSDFIKVFESLIWLRHNIEKEGKKYDRISCPKCHFSTMSEKVQNVGNGDANGAYNIARRGLMIYEKIRSEKLRKKINTKDGIKSADLKVTLKEWDEITFKQWDKKDWNDSNNEREL

SEQ ID NO: 1514 - protein, 1494 aa, unidentified
  REGION 1..1494: note = Cas Enzyme sequence
MNRIYQGKVTAVEIPDGNDEQDRPKWKKLDTAESALWQHHELFQDAVNYYIVALASLGSSPESKLTRLRELLKPVWKGFDKKGQRRQGMRDSLRRAWQLEQPPTLIEAVERFRQQLMMNGVQAEEMELAGESLAIDLGGEGSIQQGGIEYWPYFCQSGFKRGVTFPREAAQLAKEKAVKQVARLVWNSKAELHVVHIHRALKQSHFCNVSGSGKVLMEDRAGEVFKDALRELKAAGHITAKQHELFSAKLESKVPEVPEYAGGSINKDALKERFYGFLIFKHLAPNIEGLRVLRSIYDEPVKKKAGKEKDLTEKEKQEARLVSLGEDPIKMVRARSKIVFRAFTALPLWGSQVVSDELYERSAYAQELIAGESHQIAWKEFDVAAFKEALKVYNQFQQNVEKREDKLNAFAAKLLVMDGERAMEAYASEMDKVLRERLEKIWRESKGKPKAPTNDSGEETSLPHFTGDARIDRLRQIINDDLAEEYRLTEGRKTAYGLRRRTMKGWGEVKRKWQSHVKSGEKFSDEKRQKLNDVLDEMRGGEKREQIGSHKLFEALLTDDKAWGIWREPDEKLQEQINKNEWASDPLEAFREYCEIREAMEEVSARPLNFTPADTRYSRRLFMFTDVCSFGKNSGDYKHDTKELAVTVPVAIRDAVGRFAIQRCRLVYSAPRLLRDRIRAEDGSYVQDWTQPMMHALFGHSDDAANPQELKDAAVQLMPDYDVKGKRRVLLNFPLSLTPKPCWEKVYENRQQKGLFAVRYSKKDKKKEKPLNGGIWESNLRTFWEGDNPKKRDFLCWPADDRKKADWSIGDWWEKLPSFRVLAADLGTRHAASVAIIKCDMERKGTARYIGNVKGKNWFAQYRSGAILRLPGENAKVLRPESPLDKDGRGKAFREELYGERGRPADEPECQETFAILSALKQSDLLKDVTDTASLQRQFSLPELNDKLLVGIRRAQGWIAACISWHWKLTQPDSEGQRKGALVQIKEQERMLDWQTLADGNEANLTKLRTVLHTHISNQRQCVQEQLLQLTKRILPLRGRLWEWVTHPEKTDCHLLRQTEEGTGTEKVKLRGQRGLSMARIEQISELRRRWQSLNQSLRREIGQKPLTASEMRNDPIPDPCPDILTKLENIREQRVNQTAHLILAQALGLKLRVPQMSVKSREITDTHGEYEVVGPPVDMIVLEDLSRYLSEQGRAKSENTRLMKWCHRAIMLKVKMLAEPFGIPVLETPAAYSSRFCSLTGVAGFRATEIGWGDRNEFRWRELLKVDLMELQVEITKAANNKTKLETLERQLAAAKATQETFRELEKIGRSPKPHRTLLAPQPGGPMFITAKEIPHPAPTEKRRQKGNIGVLPMQADLNAAVNLALRAVAHPSCAEIHHRLRSERKKAGKGQQDSFLAREKRRFGNEKIALLPEKGNDLPKEKNTNFFFDEHRVANFGRARLETDAGSSFVYASGPGLWKKVNDRVQQWERCRLINSIRLAQWSNDPEDDVPM

SEQ ID NO: 1515 - protein, 1495 aa, unidentified
  REGION 1..1495: note = Cas Enzyme sequence
MNRIYQGKVTAVEIPDGKDEPGKPLDLDVLWHHHELFQDAVNYYLVCLLALAAKGNDVYPIREKLDAKNEAGGDDDLMIWRPFSRRGAKRRGLRDSVAPYFCPGQSNATPEDCFAAVLAGSDVSADTRNLALEELLFMCEGDNPIKTQGRWMFDRFCNPAYTGGFPFDVAKDLRVAGEARLQSEFHTLQTESEFKVFAEQLRLGWVVTETKNAKPFVGEEARGRLLKAVAHFRQAFGEKAETEMGGRMSAFLTSRSEADMNLIEITNRIRTAQPDTLPILPRNNRSIPDRLEAAILFKTFPCTFTAELLKVSFPPAKPKTSIKRKKADSELPAVRFTRLGGDAIELARGQRGYIFRAFTSLKNWSGGDTPTPRWLLFDVLAFKEALKALHQIESKKEERDEQQTELIEKLEYQRQCTLIREKSLDGSVSVNLDLKKAILERKAWKANAEGEETQPAPIIVGDPRIKRLEELLSSDLAVEDSMNGGEEVEHGLQPRTIRGFREVRKKWNDALGENAQYTDAARTKLWNLLTDYKKENVQTMGSPAIFDAMVEEKNWLIWREPTAEQLREWRKAARLPDDAEFAKDPLQALTDERELLSDIERLRGPIRLTPADPEHSRRQFYFSDASALDKKNRLRHDQQTLDTEVAVAIGGKWEVKWVRIHFTAPRLLRDQLNNTTGADSAWQQAMMTALGLKAGLTKTEKGEVRAATFAECTAVALMPEIGANGEKRILLNFPLTLDGEAIAKQLGKAARWDGLQFGGADKESYWLRWPTTWIDEKKERKKAPPAPWWKSAESFRCLSVDLGQRDAGAFALLEASQGNPPKPGISRKLGVADGKTWWATVRATGMLRLPGEDALVMRDGKWQEEFSGERGRNLVAGEWQETRGICTALGFQPDKLLGTDERRYSFPEANDQLLYALRRAQSRLARLQSWSCVAHKESDEKKRAASEKRRTRIKEQIVEAITTREADKIKAAKDHGQELLERGHWLDEVKNLVEKEAWDAIAIRIKKEIESERAIIQRELIRIADRIQPLRGRQWEWARREDGINYMLRQTIRGSDGRAKLLAGQRGLSMERIEQLESLRQRCQSLNRALRQEPGQPPNLGKSKRGIELPDPCPELLDRLDALKEQRVNQTAHMILAQALGVRLRAHADDAAARAARDIHGEYERIPGREPVDFLVLENLDRYLASQGRSRGENSKLMKWSHRAILGKLKQLCEPYGLRVLETPAAYSSRFCSLTGVAGFRAVELTPDSAKEFRWKKHLDRLADPEREKKLSKDERAESQRVQSLFAELERMNTDIRKANPARPKWRTLLAPVAGGPIFIPASDMEWFDRKNRKTGRIEKVWGFKPIGGSRPVVAQADINAAINLGLRAIAAPDTSDIHLRIRAKREGEKFVVRADNKREKARWGDKLVKADVLKESERKKLLADAHLNFFADLSGVAEYDQAEIAGEKGFASGRGIWGTIKGNERHTGKDWLRVEEINRARIQKWERGDDDVRM

SEQ ID NO: 1516 - protein, 1495 aa, unidentified
  REGION 1..1495: note = Cas Enzyme sequence
MNPQAMQRAYTLRLGGGVSGNRLRECLWQTHEAVNNGARVFGEWLLTFRGGLPHELARCTDDEAEERRSKVAKDADARAAAFTLQDARAQVAREKRVLLALSWLSVESEKGSPADFVVAAAGDADRAAKVVSALEGILRARSLREPEVRAWVADCTASLTARIRDDAVWANRSRAFDRLCSQVPGLTRDEVWDLLGRFFGGPGQYLAGEEATGEAAAEALAEGQNKQEARNWLSNRFGEDEQGADFAGLALAYDEVVAWTEQSAEGKTGSEAAAHLAAHLSGNGVALASLDLDGILRVFSAKGRRCSACELMFRTLSLDRRLAAEDADALARMARKKADDCRKKVGKKGRRAWADRLLHEVETQCSMPYRSGSRRLGEFAPMLDYAARRVSGQHSWVKLAEARRREFEEDARRIERVPPAAREWLDRYCEERSAESGALEPYRIRRRAVDGWKDIVAAWSAPSCRLAEDRVAIARSLQDDPEVGKFDAQLVEALAADDALCVWQADGHPNPHILLDYVAARDAEFKRAHFKVPAYRHPDPLLHPVFCDFGKSRWTISFAAHHASGKLPKLKADLEKGRQAVGEARQKLASASAKRKAAAELALKKAEERLARVEADHVLLADHHAVTMHLWDGQDLTPVTARWQSKRLVADFALESNTLDAAGSPLSVTRADRLGRSVAGAAPTDAVLPANIFNEKDWGARLQAPRAQLEAIAKVRDNPRLPAAERDRRLQAMLSKVKWFLTLSARLRPQGPWIDYALAYAGRSGQPLVEKSRGEIAVSGNGHRGIAYPFRHPDNDKARKAKASHILSRLPGLRVLSVDLGHRCAAACAVWQTLTVAEMKSACKAAGQPPPAPGDLFASLRVADADTGKMRTTVYRRLGPDVLDDGSPHPAPWARLDRQFTIKLQGEDRPARLATKQEIAALESFERSVGRASLRRLPLNVDELMAHTVRTARLALQDHAAHARIALHLGSSDQVAAALLEWHRLAAGGRQQDGQARLWWRDHIAGLPGGLLLPAEEDRPETSRRRQRDLERQLVPLAEALAADQPLCSLLAGLWAARWRGNDGHPAETDETTGQRLSPPAGWHARFRWLSDWVLPRGSSAARYETRNVGGISLTRIATMESLYKVQKAFLQRLTPEGRRCNAAGEALTAPADFGRSVRYAIDRLRENRVKQLASRIAEAALGAGIEKRRGDGGRMPCRPCRPLADVRFAPCHAIVIENLAMYRPEQIRTRRENRQLMSWSSSRVRKHLAEACQLYGIHLREVAANYTSRQDSRTGAPGIRCSDIPVAEFVSPYGAFAKRLIAAADAVRKGKADPEQQYLFDLLARWKKAEQTWRDAAGQAWRLDADDRWSAVGAAPGRHAPDPVRIPNSGGELFVSADAASPAAGGIQADLNAAANIGLRALLDPDWPGRWWYVPCDRATLKPAAEHVGGSAFFNGAPLPMAAAHERQDGRAIVNLWRDPSSGPAGGAGWNETTAYWNAVRDRGVAVLRARAGL

SEQ ID NO: 1517 - protein, 1495 aa, unidentified
  REGION 1..1495: note = Cas Enzyme sequence
MNPQAMQRAYTLRLGGGVSGNRLRECLWQTHEAVNNGARVFGEWLLTFRGGLPHELARCTDDEAEERRSKVAKDADARAAAFTLQDARAQVAREKRVLLALSWLSVESEKGSPADFVVAAAGDADRAAKVVSALEGILRARSLREPEVRAWVADCTASLTARIRDDAVWANRSRAFDRLCSQVPGLTRDEVWDLLGRFFGGPGQYLAGEEATGEAAAEALAEGQNKQEARNWLSNRFGEDEQGADFAGLALAYDEVVAWTEQSAEGKTGSEAAAHLAAHLSGNGVALASLDLDGILRVFSAKGRRCSACELMFRTLSLDRRLAAEDADALARMARKKADDCRKKVGKKGRRAWADRLLHEVETQCSMPYRSGSRRLGEFAPMLDYAARRVSGQHSWVKLAEARRREFEEDARRIERVPPAAREWLDRYCEERSAESGALEPYRIRRRAVDGWKDIVAAWSAPSCRLAEDRVAIARSLQDDPEVGKFDAQLVEALAADDALCVWQADGHPNPHILLDYVAARDAEFKRAHFKVPAYRHPDPLLHPVFCDFGKSRWTISFAAHHASGKLPKLKADLEKGRQAVGEARQKLASASAKRKAAAELALKKAEERLARVEADHVLLADHHAVTMHLWDGQDLTPVTARWQSKRLVADFALESNTLDAAGSPLSVTRADRLGRSVAGAAPTDAVLPANIFNEKDWGARLQAPRAQLEAIAKVRDNPRLPAAERDRRLQAMLSKVKWFLTLSARLRPQGPWIDYALAYAGRSGQPLVEKSRGEIAVSGNGHRGIAYPFRHPDNDKARKAKASHILSRLPGLRVLSVDLGHRCAAACAVWQTLTVAEMKSACKAAGQPPPAPGDLFASLRVADADTGKMRTTVYRRLGPDVLDDGSPHPAPWARLDRQFTIKLQGEDRPARLATKQEIAALESFERSVGRASLRRLPLNVDELMAHTVRTARLALQDHAAHARIALHLGSSDQVAAALLEWHRLAAGGRQQDGQARLWWRDHIAGLPGGLLLPAEEDRPETSRRRQRDLERQLVPLAEALAADQPLCSLLAGLWAARWRGNDGHPAETDETTGQRLSPPAGWHARFRWLSDWVLPRGSSAARYETRNVGGISLTRIATMESLYKVQKAFLQRLTPEGRRCNAAGEALTAPADFGRSVRYAIDRLRENRVKQLASRIAEAALGAGIEKRRGDGGRMPCRPCRPLADVRFAPCHAIVIENLAMYRPEQIRTRRENRQLMSWSSSRVRKHLAEACQLYGIHLREVAANYTSRQDSRTGAPGIRCSDIPVAEFVSPYGAFAKRLIAAADAVRKGKADPEQQYLFDLLARWKKAEQTWRDAAGQAWRLDADDRWSAVGAAPGRHAPDPVRIPNSGGELFVSADAASPAAGGIQADLNAAANIGLRALLDPDWPGRWWYVPCDRATLKPAAEHVGGSAFFNGAPLPMAAAHERQDGRAIVNLWRDPSSGPAGGTGWNETTAYWNAVRDRGVAVLRARAGL

SEQ ID NO: 1518 - protein, 1496 aa, unidentified
  REGION 1..1496: note = Cas Enzyme sequence
MADDLSTQRAYTLRLQGTDPEDQSWRDALWMTHEAVNAGGRAFGDWLLTLRGGIAHELADTPVKGKKDITDELRKNRRILLALSWLSVESRRGAPDKFIVAGGEEPAGSRNEKVLQALKEILKRRGLSAEESESWMSDCRASLSAAIRDDAVWVNRSAAFDDAQVRIGASLTREDIWDMLDPFFGSREAYLTPAKKKKEDEDSSEGTGEEKAKDLVQKAGQWLSSRFGTGKGANFAAMAEVYSKISEWAGTAQEGVSGKEGIKNLADALAAFSPVSQNLEGVLKLISGPGYKSATRDLLGELDSLPVVSRDHLSALHEKAAEDTVKCKESTGTKGRRPYADAILNDVEKRCGFTYLTDSDNRSVSILDTSEFPSDYKWGTARHSEFAVILDHAARRISVAHSWIKLAEAERDRCEEDAAKVYDLPDKVKEWLDTFCSNRSDISGAQGEGYRIRRKAIEGWKEVVASWGRSSCITAEDRVAAARALQDDPEIDKFGDIQLFEILAQDEALCVWHKDGDVAKSPDAQMLIDYVLASDAESKKRRFKVPAYRHPDALLHPIFCDFGNSRWDITYDIHGARGKKKAKRGSKKEEAMPRGVAMKLWTGSDVLSVSLRWQSKKLAADLALDQEAEEVTDTAAVSRADRLGRAAAGIDRGAGVTIAGLFEEAHWNGRLQAPRQQLEAIAAVRDNQKLSSEERERRIAFMKDRIRWLVTFSAKLRPQGPWHSYAPTQGLQSDPKYWPHSEINKKRKGQAKLILSRLPGLRILSVDLGHRFAAACAVWETMSSEAIQEACRLANHQLPAPADLYLHLKRTVQKNLIDGEKTVEESTVYRRIGADRLPDGTAHPAPWARLDRQFLIKLQGEEKVREASNEEVWQVHLMESALGLSFPLIDRLVYAGWGGTEKQAARLEALREKGWKPTGTPADQDEEGGGYKPSLAVDELMFSAVRTLRLALKYHGDRARIAFALTADYKPMPGDTRYYFSEAKDRSSGADAAEREAKHKDYLLDMLLLWHDLAFSRKWRDEEAKELWNLHIAALPGYQAPAAPIQEEAGQGRKKAREEARAKMTPAAEALLADGTLREKLHGLWKERWEKDDAQWKKHLRWMKDGILPRGGRAATPSIRYVGGLSLTRLATLTEFRRKVQVGFYTRLFPSGEKREIKEAFGQTALDALERLREQRVKQLASRIAEAALGAGRVSRTALKQDPKRPEARVDAACHAVIIENLEHYRPEETRTRRENRGLMNWASSKVKKYLSEACQLHGLFLREVPAGYTSRQDSRTGAPGMRCQDVTVKTFLNSPFWQKQCVQAQKNKSTARDRFLCALKEAVAQGGMEEEKKMGPIRVPVPGGEVFVSADAASPAAKGLQADLNAAANIGLRALLDPDWPGKWWYVPCDRKTAYPAKEKVEGSAAVDVKQALPFVLPEEKENKGKTKGGKKGKGEVMNLWRDVSAEPLMTGQWLDYTAYRKEVENRVIQVLTAQLKARNPLRFGNLGDEEEIPY

SEQ ID NO: 1519 - protein, 1496 aa, unidentified
  REGION 1..1496: note = Cas Enzyme sequence
MADDLSTQRAYTLRLQGTDPEDQSWRDALWMTHEAVNAGGRAFGDWLLTLRGGIAHELADTPVKGKKDITDELRKNRRILLALSWLSVESRRGAPDKFIVAGGEEPAGSRNEKVLQALKEILKRRGLSAEESESWMSDCRASLSAAIRDDAVWVNRSAAFDDAQVRIGASLTREDIWDMLDPFFGSREAYLTPAKKKKEDEDSSEGTGEEKAKDLVQKAGQWLSSRFGTGKGANFAAMAEVYSKISEWAGTAQEGVSGKEGIKNLADALAAFSPVSQNLEGVLKLISGPGYKSATRNLLGELDSLPVVSRDHLSALHEKAAEDTVKCKESTGTKGRRPYADAILNDVEKRCGFTYLTDSDNRSVSILDTSEFPSDYKWGTARHSEFAVILDHAARRISVAHSWIKLAEAERDRCEEDAAKVYDLPDKVKEWLDTFCSNRSDISGAQGEGYRIRRKAIEGWKEVVASWGRSSCITAEDRVAAARALQDDPEIDKFGDIQLFEILAQDEALCVWHKDGDVAKSPDAQMLIDYVLASDAESKKRRFKVPAYRHPDALLHPIFCDFGNSRWDITYDIHGARGKKKAKRGSKKEEAMPRGVAMKLWTGSDVLSVSLRWQSKKLAADLALDQEAEEVTDTAAVSRADRLGRAAAGIDRGAGVTIAGLFEEAHWNGRLQAPRQQLEAIAAVRDNQKLSSEERERRIAFMKDRIRWLVTFSAKLRPQGPWHSYAPTQGLQSDPKYWPHSEINKKRKGQAKLILSRLPGLRILSVDLGHRFAAACAVWETMSSEAIQEACRLANHQLPAPADLYLHLKRTVQKNLIDGEKTVEESTVYRRIGADRLPDGTAHPAPWARLDRQFLIKLQGEEKVREASNEEVWQVHLMESALGLSFPLIDRLVYAGWGGTEKQAARLEALREKGWKPTGTPADQDEEGGGYKPSLAVDELMFSAVRTLRLALKYHGDRARIAFALTADYKPMPGDTRYYFSEAKDRSSGADAAEREAKHKDYLLDMLLLWHDLAFSRKWRDEEAKELWNLHIAALPGYQAPAAPIQEEAGQGRKKAREEARAKMTPAAEALLADGTLREKLHGLWKERWEKDDAQWKKHLRWMKDGILPRGGRAATPSIRYVGGLSLTRLATLTEFRRKVQVGFYTRLFPSGEKREIKEAFGQTALDALERLREQRVKQLASRIAEAALGAGRVSRTALKQDPKRPEARVDAACHAVIIENLEHYRPEETRTRRENRGLMNWASSKVKKYLSEACQLHGLFLREVPAGYTSRQDSRTGAPGMRCQDVTVKTFLNSPFWQKQCVQAQKNKSTARDRFLCALKEAVAQGGMEEEKKMGPIRVPVPGGEVFVSADAASPAAKGLQADLNAAANIGLRALLDPDWPGKWWYVPCDRKTAYPAKEKVEGSAAVDVKQALPFVLPEEKENKGKTKGGKKGKGEVMNLWRDVSAEPLMTGQWLDYTAYRKEVENRVIQVLTAQLKARNPLRFGNLGDEEEIPY

SEQ ID NO: 1520 - protein, 1496 aa, unidentified
  REGION 1..1496: note = Cas Enzyme sequence
MADDLSTQRAYTLRLQGTDPEDQSWRDALWMTHEAVNAGGRAFGDWLLTLRGGIAHELADTPVKGKKDITDELRKNRRILLALSWLSVESRRGAPDKFIVAGGEEPAGSRNEKVLQALKEILKRRGLSAEESESWMSDCRASLSAAIRDDAVWVNRSAAFDDAQVRIGASLTREDIWDMLDPFFGSREAYLTPAKKKKEDEDSSEGTGEEKAKDLVQKAGQWLSSRFGTGKGANFTAMAEVYSKISEWAGTAQEGVSGKEGIKNLADALAAFSPVSQNLEGVLKLISGPGYKSATRNLLGELDSLPVVSRDHLSALHEKAAEDTVKCKESTGTKGRRPYADAILNDVEKRCGFTYLTDSDNRSVSILDTSEFPSDYKWGTARHSEFAVILDHAARRISVAHSWIKLAEAERDRCEEDAAKVYDLPDKVKEWLDTFCSNRSDISGAQGEGYRIRRKAIEGWKEVVASWGRSSCITAEDRVAAARALQDDPEIDKFGDIQLFEILAQDEALCVWHKDGDVAKSPDAQMLIDYVLASDAESKKRRFKVPAYRHPDALLHPIFCDFGNSRWDITYDIHGARGKKKAKRGSKKEEAMPRGVAMKLWTGSDVLSVSLRWQSKKLAADLALDQEAEEVTDTAAVSRADRLGRAAAGIDRGAGVTIAGLFEEAHWNGRLQAPRQQLEAIAAVRDNQKLSSEERERRIAFMKDRIRWLVTFSAKLRPQGPWHSYAPTQGLQSDPKYWPHSEINKKRKGQAKLILSRLPGLRILSVDLGHRFAAACAVWETMSSEAIQEACRLANHQLPAPADLYLHLKRTVQKNLIDGEKTVEESTVYRRIGADRLPDGTAHPAPWARLDRQFLIKLQGEEKVREASNEEVWQVHLMESALGLSFPLIDRLVYAGWGGTEKQAARLEALREKGWKPTGTPADQDEEGGGYKPSLAVDELMFSAVRTLRLALKYHGDRARIAFALTADYKPMPGDTRYYFSEAKDRSSGADAAEREAKHKDYLLDMLLLWHDLAFSRKWRDEEAKELWNLHIAALPGYQAPAAPIQEEAGQGRKKAREEARAKMTPAAEALLADGTLREKLHGLWKERWEKDDAQWKKHLRWMKDGILPRGGRAATPSIRYVGGLSLTRLATLTEFRRKVQVGFYTRLFPSGEKREIKEAFGQTALDALERLREQRVKQLASRIAEAALGAGRVSRTALKQDPKRPEARVDAACHAVIIENLEHYRPEETRTRRENRGLMNWASSKVKKYLSEACQLHGLFLREVPAGYTSRQDSRTGAPGMRCQDVTVKTFLNSPFWQKQCVQAQKNKSTARDRFLCALKEAVAQGGMEEEKKMGPIRVPVPGGEVFVSADAASPAAKGLQADLNAAANIGLRALLDPDWPGKWWYVPCDRKTAYPAKEKVEGSAAVDVKQALPFVLPEEKENKGKTKGGKKGKGEVMNLWRDVSAEPLMTGQWLDYTAYRKEVENRVIQVLTAQLKARNPLRFGNLGDEEEIPY

SEQ ID NO: 1521 - protein, 1496 aa, unidentified
  REGION 1..1496: note = Cas Enzyme sequence
MADDLSTQRAYTLRLQGTDPEDQSWRDALWMTHEAVNAGGRAFGDWLLTLRGGIAHELADTPVKGKKDITDELRKNRRILLALSWLSVESRRGAPDKFIVAGGEEPAGSRNEKVLQALKEILKRRGLSAEESESWMSDCRASLSAAIRDDAVWVNRSAAFDDAQVRIGASLTREDIWDMLDPFFGSREAYLTPAKKKKEDEDSSEGTGEEKAKDLVQKAGQWLSSRFGTGKGANFDAMAEVYSKISEWAGTAQEGVSGKEGIKNLADALAAFSPVSQNLEGVLKLISGPGYKSATRNLLGELDSLPVVSRDHLSALHEKAAEDTVKCKESTGTKGRRPYADAILNDVEKRCGFTYLTDSDNRSVSILDTSEFPSDYKWGTARHSEFAVILDHAARRISVAHSWIKLAEAERDRCEEDAAKVYDLPDKVKEWLDTFCSNRSDISGAQGEGYRIRRKAIEGWKEVVASWGRSSCITAEDRVAAARALQDDPEIDKFGDIQLFEILAQDEALCVWHKDGDVAKSPDAQMLIDYVLASDAESKKRRFKVPAYRHPDALLHPIFCDFGNSRWDITYDIHGARGKKKAKRGSKKEEAMPRGVAMKLWTGSDVLSVSLRWQSKKLAADLALDQEAEEVTDTAAVSRADRLGRAAAGIDRGAGVTIAGLFEEAHWNGRLQAPRQQLEAIAAVRDNQKLSSEERERRIAFMKDRIRWLVTFSAKLRPQGPWHSYAPTQGLQSDPKYWPHSEINKKRKGQAKLILSRLPGLRILSVDLGHRFAAACAVWETMSSEAIQEACRLANHQLPAPADLYLHLKRTVQKNLIDGEKTVEESTVYRRIGADRLPDGTAHPAPWARLDRQFLIKLQGEEKVREASNEEVWQVHLMESALGLSFPLIDRLVYAGWGGTEKQAARLEALREKGWKPTGTPADQDEEGGGYKPSLAVDELMFSAVRTLRLALKYHGDRARIAFALTADYKPMPGDTRYYFSEAKDRSSGADAAEREAKHKDYLLDMLLLWHDLAFSRKWRDEEAKELWNLHIAALPGYQAPAAPIQEEAGQGRKKAREEARAKMTPAAEALLADGTLREKLHGLWKERWEKDDAQWKKHLRWMKDGILPRGGRAATPSIRYVGGLSLTRLATLTEFRRKVQVGFYTRLFPSGEKREIKEAFGQTALDALERLREQRVKQLASRIAEAALGAGRVSRTALKQDPKRPEARVDAACHAVIIENLEHYRPEETRTRRENRGLMNWASSKVKKYLSEACQLHGLFLREVPAGYTSRQDSRTGAPGMRCQDVTVKTFLNSPFWQKQCVQAQKNKSTARDRFLCALKEAVAQGGMEEEKKMGPIRVPVPGGEVFVSADAASPAAKGLQADLNAAANIGLRALLDPDWPGKWWYVPCDRKTAYPAKEKVEGSAAVDVKQALPFVLPEEKENKGKTKGGKKGKGEVMNLWRDVSAEPLMTGQWLDYTAYRKEVENRVIQVLTAQLKARNPLRFGNLGDEEEIPY

SEQ ID NO: 1522 - protein, 1496 aa, unidentified
  REGION 1..1496: note = Cas Enzyme sequence
MADDLSTQRAYTLRLQGTDPEDQSWRDALWMTHEAVNAGGRAFGDWLLTLRGGIAHELADTPVKGKKDITDELRKKRRILLALSWLSVESRRGAPDKFIVAGGEEPAGSRNEKVLQALKEILKRRGLSAEESESWMSDCRASLSAAIRDDAVWVNRSAAFDDAQVRIGASLTREDIWDMLDPFFGSREAYLTPAKKKKEDEDSSEGTGEEKAKDLVQKAGQWLSSRFGTGKGANFAAMAEVYSKISEWAGTAQEGVSGKEGIKNLADALAAFSPVSQNLEGVLKLISGPGYKSATRNLLGELDSLPVVSRDHLSALHEKAAEDTVKCKESTGTKGRRPYADAILNDVEKRCGFTYLTDSDNRSVSILDTSEFPSDYKWGTARHSEFAVILDHAARRISVAHSWIKLAEAERDRCEEDAAKVYDLPDKVKEWLDTFCSNRSDISGAQGEGYRIRRKAIEGWKEVVASWGRSSCITAEDRVAAARALQDDPEIDKFGDIQLFEILAQDEALCVWHKDGDVAKSPDAQMLIDYVLASDAESKKRRFKVPAYRHPDALLHPIFCDFGNSRWDITYDIHGARGKKKAKRGSKKEEAMPRGVAMKLWTGSDVLSVSLRWQSKKLAADLALDQEAEEVTDTAAVSRADRLGRAAAGIDRGAGVTIAGLFEEAHWNGRLQAPRQQLEAIAAVRDNQKLSSEERERRIAFMKDRIRWLVTFSAKLRPQGPWHSYAPTQGLQSDPKYWPHSEINKKRKGQAKLILSRLPGLRILSVDLGHRFAAACAVWETMSSEAIQEACRLANHQLPAPADLYLHLKRTVQKNLIDGEKTVEESTVYRRIGADRLPDGTAHPAPWARLDRQFLIKLQGEEKVREASNEEVWQVHLMESALGLSFPLIDRLVYAGWGGTEKQAARLEALREKGWKPTGTPADQDEEGGGYKPSLAVDELMFSAVRTLRLALKYHGDRARIAFALTADYKPMPGDTRYYFSEAKDRSSGADAAEREAKHKDYLLDMLLLWHDLAFSRKWRDEEAKELWNLHIAALPGYQAPAAPIQEEAGQGRKKAREEARAKMTPAAEALLADGTLREKLHGLWKERWEKDDAQWKKHLRWMKDGILPRGGRAATPSIRYVGGLSLTRLATLTEFRRKVQVGFYTRLFPSGEKREIKEAFGQTALDALERLREQRVKQLASRIAEAALGAGRVSRTALKQDPKRPEARVDAACHAVIIENLEHYRPEETRTRRENRGLMNWASSKVKKYLSEACQLHGLFLREVPAGYTSRQDSRTGAPGMRCQDVTVKTFLNSPFWQKQCVQAQKNKSTARDRFLCALKEAVAQGGMEEEKKMGPIRVPVPGGEVFVSADAASPAAKGLQADLNAAANIGLRALLDPDWPGKWWYVPCDRKTAYPAKEKVEGSAAVDVKQALPFVLPEEKENKGKTKGGKKGKGEVMNLWRDVSAEPLMTGQWLDYTAYRKEVENRVIQVLTAQLKARNPLRFGNLGDEEEIPY

SEQ ID NO: 1523 - protein, 1496 aa, unidentified
  REGION 1..1496: note = Cas Enzyme sequence
MADDLSTQRAYTLRLQGTDPEDQSWRDALWMTHEAVNAGGRAFGDWLLTLRGGIAHELADTPVKGKKDITDELRKNRRILLALSWLSVESRRGAPDKFIVAGGEEPAGSRNEKVLQALKEILKRRGLSAEESESWMSDCRASLSAAIRDDAVWVNRSAAFDDAQVRIGASLTREDIWDMLDPFFGSREAYLTPAKKKKEDEDSSEGTGEEKAKNLVQKAGQWLSNRFGTGKGANFAAMAEVYSKISEWAGTAQEGVSGKEGIKNLADALAAFSPVSQNLEGVLKLISGPGYKSATRNLLGELDSLPVVSRDHLSALHEKAAEDTVKCKESTGTKGRRPYADAILNDVEKRCGFTYLTDSDNRSVSILDTSEFPSDYKWGTARHSEFAVILDHAARRISVAHSWIKLAEAERDRCEEDAAKVYDLPDKVKEWLDTFCSNRSDISGAQGEGYRIRRKAIEGWKEVVASWGRSSCITAEDRVAAARALQDDPEIDKFGDIQLFEILAQDEALCVWHKDGDVAKSPDAQMLIDYVLASDAESKKRRFKVPAYRHPDALLHPIFCDFGNSRWDITYDIHGARGKKKAKRGSKKEEAMPRGVAMKLWTGSDVLSVSLRWQSKKLAADLALDQEAEEVTDTAAVSRADRLGRAAAGIDRGAGVTIAGLFEEAHWNGRLQAPRQQLEAIAAVRDNQKLSSEERERRIAFMKDRIRWLVTFSAKLRPQGPWHSYAPTQGLQSDPKYWPHSEINKKRKGQAKLILSRLPGLRILSVDLGHRFAAACAVWETMSSEAIQEACRLANHQLPAPADLYLHLKRTVQKNLIDGEKTVEESTVYRRIGADRLPDGTAHPAPWARLDRQFLIKLQGEEKVREASNEEVWQVHLMESALGLSFPLIDRLVYAGWGGTEKQAARLEALREKGWKPTGTPADQDEEGGGYKPSLAVDELMFSAVRTLRLALKYHGDRARIAFALTADYKPMPGDTRYYFSEAKDRSSGADAAEREAKHKDYLLDMLLLWHDLAFSRKWRDEEAKELWNLHIAALPGYQAPAAPIQEEAGQGRKKAREEARAKMTPAAEALLADGTLREKLHGLWKERWEKDDAQWKKHLRWMKDGILPRGGRAATPSIRYVGGLSLTRLATLTEFRRKVQVGFYTRLFPSGEKREIKEAFGQTALDALERLREQRVKQLASRIAEAALGAGRVSRTALKQDPKRPEARVDAACHAVIIENLEHYRPEETRTRRENRGLMNWASSKVKKYLSEACQLHGLFLREVPAGYTSRQDSRTGAPGMRCQDVTVKTFLNSPFWQKQCVQAQKNKSTARDRFLCALKEAVAQGGMEEEKKMGPIRVPVPGGEVFVSADAASPAAKGLQADLNAAANIGLRALLDPDWPGKWWYVPCDRKTAYPAKEKVEGSAAVDVKQALPFVLPEEKENKGKTKGGKKGKGEVMNLWRDVSAEPLMTGQWLDYTAYRKEVENRVIQVLTAQLKARNPLRFGNLGDEEEIPY

SEQ ID NO: 1524 - protein, 1497 aa, unidentified
  REGION 1..1497: note = Cas Enzyme sequence
MAKKPSAAQAIASSVGTVEPVPTQRAYTLRLRGVDSNDTSWRDALWATHEAINVGAKVFGEWLLTLRGGLEHTLADAPVKGGKGKPDRAPTEDERRDRRVLLALSWLSVEDERGAPKEPGLIVAFGDDCKFAKDSQDGRDRKVADALRGILAKRGVAPDTLEEWMTDCQGSLTARIRDDAVWVNRSAAFDALAVSWKSLTRANARPVLEEFFGSASEWVTLPAPATEGEDDESGGGATAGGGGGGGDGAEFRTIARSFLSANFGTGPKSDKGGISDALTRAVGSLEKLRAGSPGSVVLSHLCKEFDLSGEDDETRERALCKRIGWKGRSSKGRLALTTAHGKARIEREDIDLLILKLNEEAAEKREGSAKAVPPWIESLKSVLENALGFGFVTERNLIGEFGVMLDHAARRVSIACSWIKLAELERRQFEADATKLDQVRDQHPDAAAFLDALGQKRGGESGTAGGSAVLIRKRAVLGWKEVVAAWARPGCKTVQDRVDAARLLQGELEKFGDNKLFEELAADNARIVWQNADSAADPTILERYSAGSVAEANQQRFKVPAYRHPDPLRHPVFGDFGVSRFEIAFAIHERVRAAASGKRAGKADAEWYADPRNLRMGLWTGQRVEKVSLRWSSKRLANDLSLRESGDADPVAVTRADRLGRASVGQTCPVHVASVFAEDNWNGRLQAPRAELDKIARLIERGKPAQARKLRDHISWLVSFSPKLAPSGPFIDYAAANGIEPNRKSGEYWPHSAMNKERKGHHAKLIYARLLGLRVLSVDLGHRFAAACAVWESVATAQVRSETNQGKVVRGGIDKNSLYAHIESKTADGKPRTTVYRRVGPDTLPDGSMHPAPWARLDRQFLIKLQGEEQPPRRAADDEEAMVEGWEKALGLQPLADSDTKPRKDVAELMARAVRLFTLAGRRHNDRARIAHNLIAKHRTKPGGVPEPLTEEGRFELLTETLALWHGLFAGDRWTDPKAQHAWDECGLPTIDLPARGDDEGSSYGGPGRKAAMEAYHAKLRPHAQRLAKTDLSKLAKRWSDRWEQDDRQWEHREKRAGFLRELRQWITPRGLRITAKDSTATRERKAAAALQARHVGGLSMQRINTLTGLYRLLKSFKNRPEPDNLRKNIPEKGDQRLAKFNRRLLDVRDRLREQRVKQLASRITEAALGVGRIKSRHVAAGAARPTSRVDAPCHAVVIESLTNYRPDELQTRRENRQLMEWSSAKLDKYLSESCQLHGLHKREVQPNYTSRQCSRTGAPGLRGVEVSAHDLLTKPWWKKDVAKAKANIEKARKEGRDGAFADRLLVNAEQWALRIPEQDRKDRKAQGSHKPSRAARIVLPRKGGDLFIAESATPNAKGHVPALQADLNAAANIGLRALLDPDWPGKWWWVPCTGGTYTPAPEKTSGADVFKGLTALLHEEPKNRTEGAAGGTEPSKKSRTKPVKAKEVRAIENRWRACSSEPLGTGEWMPSGEYWAKAEDRVRRLLDLQTTPQTRT

SEQ ID NO: 1525 - protein, 1498 aa, unidentified
  REGION 1..1498: note = Cas Enzyme sequence
LRGGLDHTLADAKVKGGKGKPDRDPTDEERKARRVLLALSWLSVESKLGAPPEFIVASGHDVAKNGNEKVFEALEEILKSRKIAKNEIKEWKDNCSASLGAAIQEDDAVWVNRSKAFDKAKVNDLKGLTRKYAQNAIMHFFGPEHDYFALPGGGNDDDDNDDADSSRLVANEGPEYRTLARQWISTNFGTGKKSNNERIIEILRKLVASDLNRFACHPKSEIIKEMCKIVNCSSPDLDKLCVAIGWITGRKSTGRLAIENLPACPNKTDIEKMKQKLADEADEKDSASGMREVPSWIALLRLSIEQACSIPFVGKRNHIGEFAVMLDHAARRVSIAHSWIKRAEAERRKFEVETKKVNIVPVAAKKWLDLFCMERTVMSGALAQYRIRRRAVNGWKEVVAAWGKSSCINLDDRIAVARALQFDPEIKIDKIGDIQLFEALAEDDAACVWHEEGDATKATAHQPLIDYVIATEAEFKKRHFKVPAYCHPDAFMHPIFCDFGNSRWDIDFSVREAAIYLEKAKTRCTKKQAVVNKVELILRKSSGNIAKEDQLIDKLKTAKRELEDAERELERLNSKHGMTMTLFDGKAVKKTELAWRSKRLAADLALHTDDDSTKLIEVSRANRLGRAASNVTGRDGVKISGLFEQADWNGRLQAPRKQLEAIAKRVADNRWDTKAKKMRDSLQWLVSFSAKLQPNGPWCDFASANNIKLDQKNGEIILASQNSKNDWRGLAYPFWHSSNEEGRKGMAKHNLSRLAGLRVLSVDLGHRYAAACAVWEAISTDKVRKACRAAGHEPPKASDLYLHLKQKVKKVEKGGQTEVNKTTIYRRIGADKLPNGMPHSAPWARLDRQFLIRLQGEEQGVREASNKEIWEVHQLEAEIGRTAPIIDQLVKGGWGESEKQKKRLKVLRTLGWKPINKDVGDVSSPSLSIDEMMFFAVRTMRLGLKRHADRARIAFAMTAAYNTMPGGRRYYFNEPKELSANDNKAERDNKRVEFIQDALMLWHSLAFSNGWQDDAASQLWDGLIAKLPGYKIPEEIGEEDSGAERRKKMKENRKNLYDVAVALAKDAKLRKALHEAWKKRWEGDDKQWQKRLRWFKDWILPRGKAAQDSAIRKVGGLSLTRLATLTEFRRKVQVGFFTRLKPDGTSEKNKERFGQRTLDALENMREQRVKQLASRIAESALGIGRMKRFRGEKDVKRPRERVDEPCHAIVIENLTQYRPKETRTRRENCLLMTWSSSKVKKYLTESCQLHGIHLREVSASYTSLQDSRTGSPGIRCQDLSVKEFMRSKYWRKQVEQAEKKPAEGKGDSRMRFLCELNKRWKDKRGEWEKAGVIRIPLKGGEIFVSAESKSPAAMGLQADLNAAANIGLRALTDPDWPGKWWYVPCDRASFKPVREKVDGSAAVNPDKQLRQPAHVHSSDIDKIITKRGRKNVGKANGIVNLWRDISSSSLECVKSGEWKEIAAYQNDVQCRVIRNIKEKKKGRDKQPQKGSKEADIPF

SEQ ID NO: 1526 - protein, 1498 aa, unidentified
  REGION 1..1498: note = Cas Enzyme sequence
MVESNRASRWALPMAKPIERPTTRRAYTLRLRGNTPQDCTWRDALWATHEAVNKGAKVFGDWLLTLRGGIDHALADGPVKQKGDTTRSATSLERRDRRILLALSWLTVEDARGAPADESLIVARGTDNAEVRLQKLVAALDAILKARGVADMERGDSKRLAADQRGTWLGDCIPSLAAAIRDDAVWVNRSKAYDNVQNRLSMTRDEIWDFLEPFFAGVDAYLAAAESEVTQGDVPAANTPEKAKDLCQKAGGWLSKRFGTGIGANFRQMAQVYSAICTWAGQHKAFDSGTNAIESLAKSLNSFSPAPQDAKGILKLISGRGHKSATQNIIAAWADSPASITAEAIARLAETAGSDRDKCSTKADGKGRRIYSDTILNAVETVCGLTYLQDHGPARHYEFSVILDHAARRVNVVHSWIKNAEAERRAFENDSTRITQVPEPALRWLRGYCESRGNISGSLDTYRLRRRAIDSWDKVVERWSHSRCETKEDRIAEARQLQDDPSIDKFGDIQLFEALASDDALCIWNTPEGPNPQSLKDFVAATEADDKKRRFKVPAYRHPDALRNPVFVDFGYSRWHIDYSAHRRPVKSVQLREHLAAHNATVTEIREKMLRATESRKASLMKRLEDAIAQQRECEQAVTELDDHYRVMMKLWTGQAVASVPMRWSCKRLTADLALRNPPAVTSDQPGGVSRADRLGRAANHVGTDESMTILGLFEQADWNGRLQAPRDQLDRIARHVEKHGWDAKAARLVGRLKWLVSFSAKLTQQGPWTTYCQLFDQNSHSLPFISSKGDCAVKHATNDSRHGQARLILSRLPGLRVLAVDLGHRYAAACAVWEAVTSKQVQSECQSAGVDAPDCLAMFIHLKQTTKQGKTTTTVFRRIGSDQLPNGDAHPAPWARLDRQFLIKLQGEDRSPRASSIEEMHRVEEFETWTGLQRDQNTRLRARAVDHLMNQTVRTARLALARHGRRSRIAFQLLSNMRILPGGRRQALSDAGENDLLIDTLLDWHALATDARWSDLSARQLWNSSVATLDGGLAVAAVSVMDRTPAERRQDEEVLRRQLAPLAAQLQTNRDLRHKLSAAWTERWTSDDQQWRRYLRWLARWLLPRGGSRQDGGRRHVGGLSLGRISTLTEFRRKVQVAYFTRLRPDGKCAEIGRFFGQSTLDAIQRLKDQRVKQLASRIVEAALGIGCEKKSANGRDLPRQTSVGTARRFAPCHAIVIEDLSHYRPEETRTRRENRNTMDWKSAETRKRLSDHCQLYGLCLRDIPPHYTSRQDSRTGAPGLRCVDVPIADFLSQPWWRKQVLLAQKKAVANQGDARDRYLLSLEHRWARASDVDRGKVGALRIPMNGGELFVSADAQSPLARGIQADLNAAANIGLRALTDPDFPGKWWYVPCDATTKEPHPEKVKGSIVDGIGPLATCDSKASDGGPPMRRKRSSKSSKEKPIVNLWRDAQAGPIDGAANLDVWTVTAAYWNLVKVRVIENLEKAVNGQRNELSGR

SEQ ID NO: 1527 - protein, 1500 aa, unidentified
  REGION 1..1500: note = Cas Enzyme sequence
MATAINYPTTQRAYTLRLRGIDPQDQSWRDALWATHEAVNRGAKVFGEWLLTLRGGLDHQLADAPVKVRGGTTRLPSDEERRDRRVLLALSWLSVEDAHGAPPDASLIVAKGTDSADCRARKLADALIAILQARSVAASEIGDPSKPPEDQPGTWLGDCMGSLSAAIRDDAVWVNRSKAFDAATQSCPSLTRDEIWDFLEPFFASPDAYLKPERAESDEGDSTSAATEDKAKDLVQKAGGWLSKRMGAGGGANFQDLARAYQAIAQWASSAQPGQSAQQAVGSLAGYLSQHGFSPTANDATGVLAVISGPGYKSATRNHITAIATSPEITPQDLSKLQELATKDKAGCSSKIGGKGPRPYATMILQQVEAACGFTYLQSDGPARHREFSVMLDHAARRVNVAHSWIKNAEAERRQFESDARRIKKVPQDALNWLRGYCEERGGASGSLEGYRIRRRAIDGWDQVVIRWSRSDCQSADDRIAAARQLQDDPEIDKFGDIQLFEALAAEEALCVWKPDGNPTAQPLKDFVAATEADAKKKRFKVPAYRHPDPLRHPVFTDFGNSRWGIEYSAHRAPAKCDELGQQVDRLTQAVAEAQRNLDGATAAQRASRESKLAEAQSKLVAAQTEFAAINDPHRVELKLWNGQAVAAIPMRWSSKRLIADLSLRRATQPSSDQRIGVTRADRLGRAAGNADDGRPVTITGLFQQDHWNGRLQAPRAQLDAIAKHVDKHGWDAKARRQIARIRWVVSFSAELSQQGPWFEFCHRFGEDAPARPFVSRHGEYAVKHRDNDQRKGHAKLILSRLPGLRVLAVDLGHRYAAACAVWEAISSDQMRQACAAANAPAPHPLAMYIHLKSTTAKGKPTTTIYRRIGPDKLPDDTPHPAPWARLDRQFLIKLPGEDRPARAASPDEIKAVEDFEDSVGRVRTAVDPPRKRGVDLLMHDAVRTARLALARHGRRARIAFQLISQVRILPGGRPQTLDDAGRRDLLNDTLADWYALATDSRWTDAAARQLWNERLAALNGGFTIDPPADASQPEAERTRAQRRQAEQELRHRLASLVEALFCNPTLCQQLHQAWTDRWNADDQQWRSRLKWLSRWLLPRGGSRRDGSRRHVGGLSLTRISTLIDFRRKVQVGYFTRLRPDGSRAEIGPQFGQSTLDAIQRLKDQRIKQLTSRIVEAALGIGVEQDRIWDAAKRKWRTVKRPREPRYHVDDQGVQQRDPRFQACHAVVIEDLSHYRPEETRTRRENRATMDWKSAETRKRLADHCQLYGLHLRDVNPQYTSRQDSRTGAPGCRCVDVSVADFLTKPAWRKQVAQARGKVASNRGDARDRLLVELDHQLTTANSLRGEMDSLRIPVNGGEVFVSADPRSPLAAGIQADLNAAANIGLRALMDPDFLGTWWYVPCDPSTKKPHIEKVKGSILATVGALQATSEEAAAPPRRGRGGTRSAAPREVINLWRDPSAVRIQDATAGEVWDVTPVYWSIVKDRVVDVLRQRNTKSGD

SEQ ID NO: 1528 - protein, 1503 aa, unidentified
  REGION 1..1503: note = Cas Enzyme sequence
MPQQDKPPVTQRAYTLRLRGTDPSDTSWRDVLWRTHEAVNKGAKEFGDWLLTLRGGLDHTLADTKVKGGKGKPDRDPTDEERKARRILLALSWLSVESKLGAPAGLIIASGKETTEDRNGRVVAALEEILKSRGAEDKIDEWKNDCSASLSAAIRDDAVWVNRSKAFDEAVKSVGCSLTREEVWDMLERFFGSRDAYLAPAKGSEDESSQTEQEDKAKDLVQKAGQWLSSRFGTGKGADFSRMAGVYQKIADWAGAHSPNNAGTGAIAGLASALSEFTPASNDLNGVLGLISGPGYKSATRNLLTQIDAKTTVTQADLTKLNETAAADKGKCETNTGSKGRRPYSDAILKDVESVCGLTYRVDENGNAVSVSNYSLYGDEYNWGSARHSEFAVILDHAARRVSLAHTWIKRAEAERSKFEEDAKKVDQVSKAAKDWLDKFCLERSGMSGALEPYRIRRRAVDGWKEVVAAWSKSSCSTSADRIATARALQDDPEIDKFGDIQLFEALAEDDAVCVWHKDGDAAKAPDPQPLIDYALAAEAEFKKRHFKVPAYRHPVALLHPIFCDFGKSRWDICFDVHKNVQTPFPRALCLTLWTGSEMKPVPLCWQSKRLACDLALGNNERNAGASAVTRADRLGRAASNVTKNDEVNIAGLFEQADWNGRLQAPRQQFEAIAAVRDNLSLSAKEREQRMSGMKDRIRWLVTFSARLQPQGPWCDFAETNQLRIDPQYWPHADANKTRKGQARLILSRLPGLRVLSVDLGHRYAAACAVWEALSAEKVKEACHAAGRKEPTENDLYLHLKKKVKKQKKAKAVEVEETTVYRRIGADTLLGGTQHPAPWARLDRQFLIKLQGEEEGVREASNEEVWKVYQLEAELGRTSPIIDRLVKAGWGQSNKQQTRLDALRELGWKPASGAGVSDGTDEDEAEVRKPSLSIDELMSSAVRTMRLALKRHGDRARIAFAMTAEYKPMPGDRKYYFTEAKELSANDDQATRDNKHIEFIQDALVLWHGLASSRGWRDDAAKQLWDDHVAKLSGYKAPEEIGEDASGVERKKKQKENRERLHDVAKALAEDTTLRKTLHDAWETRWEDDDEQWRKQLRWFKDWILPRGKAVDDPAIRKVGGLSLTRLATLTEFRRKVQVGFFTRLHPDGTRAETKEQFGQSALDALEHLREQRVKQLASRIAEAALGIGRMRRPMGGKDPKRPDVRIDEPCQAIVIEDLTHYRPEETRTRRENRQLMTWSSSKVKKYLAEACQLHGLHLREVSASYTSRQDSRTGTPGIRCQDVPVKEFMRSPFWRKQIAQAERKQAEGKGDSRERFLCDLNVMWKDKAVADWEKAGVARVPLKGGEIFVSADPASPAAKGLQADLNAAANIGLRALTDPDWPGKWWYVPCEPGSFSPVKDKVEGSAAVKPDQALRQPAPAQSSDAKDKKKRGKKGAGKSKEVVNLWRDISSSPLECIEFGEWKEYAAYQNEVQCRVVRVLEEEIKGRDKQPHDGAKEDDILF

SEQ ID NO: 1529 - protein, 1504 aa, unidentified
  REGION 1..1504: note = Cas Enzyme sequence
MPADETTTRAYTLKLVGGEGQRWRELLWRTHMAVNRGAQVWGDWLLTLRGGLPPALADDRPERRVILALSWLSVESPGSLVPAKFRVASAADPERAAKVIARFEEILRRLRVPHPEEWVADCEPALTARIRDDAVWVDRSAAFAELANSYPGLSTTWATETLFDLMGGEDDYFSMPETDSPAPAKSRDFVQKAGGWLSRNWGSGAKSDADAIAEALTRLATIPPSTVVGLSGVEALGELIRRLGGEPDSADPESRFKQLKQQIGWKGRASKGAIALEQIRDASQVDADVWSLVKQKLSEEATAQATKGARSSERPAWMTDLRRELESRLRMPYRTEKDLIWEHGVTLDHALRRVSVAHSWMKRAEVSRRQFQEDARRIFAVDARAREWLDQYREERSQLSAANEEYLIRKSAIDGWDKVVQAWAELGPNATRRQRVNAAREVQANLDADEKFGDIQLFAGFGDDDEDAPHPSLADDDAVSVWCDPSGKPDAGILKAYVAATVAEHNQRRFKVPAFRHPDPLRHPVYVDFGNSRWTIAYSALRAAHDRRKLLEKLERENNETRRKRLQQQLDEVPELREVTLSVWTGEDVERLPLRWQSKRLWKDLGLSNFGSIATGKPVPRADRLGRAAGGITESLAAVTEVFHQKDWNGRLQVSRAELDQLAELIYGRNAEPDYAKLDAFRPHKLSDSDRAFRQWQRLKWFLSFSAKLQPIGPWLDYVSAGLPEGIAYRKGRNGWYLNYAANLNRASRARLQLSRLPGLRVLSLDLGHRYAAACAVWETISRQQLEIACRASGQPLPDAERLFIHLREKTAKQQESGKRKGQPVVRTTIYRRIGPDVLPDGSPHAAPWARLDRQFLIKLQGEQQPARFATEEEWQGLVRFREFLGLKSPANNSPKSTSGHPTVRVDELQKDAVRIARLGLRRLADCARVAYILTAKEKPAAGGRTILLENDEQRIEYRLDALLLWQGLAQSSHYRDPWAISLWEEWVVGKLGGPAPVELPDEISRSERKQRINSSRAQLRRVAEQLKDADSPLNAELNRLWTAEWERRNNAWRQQLRWLRRFILPRPGKRPNGNDPAALQDWKVKARQLRHVGGLSLKRLKTIRDLYLVLKAYRMRPQPEDLRANVLTLGDRTLSKFGRRILDQLERLREQRIKQLASRIIEAALGVGSEDRRHFDGRRRPGRLIDDPRFAPCHAVVIENLEHYRPEESRLRRENAQLMTWAARNVRKYIVEGSQLHGLYFTEISPAWTSRQDSRTGAPGIRCEEVLTSRLMGALRSDSAGTDDGSLVDLQIRWIQRDLNRARKKVAAGTATPREQFLAGLCDRLVQLDAAHAIASLPPTVLLPRNGGELFVPSLVEADDNGRGALQADLNAAANIGLRALTDPDWYGAWWYLLVETESGQPVVDKLKGCPVWENCRPLLAAATSEPNSGREPQSRGNRNQKGTRAGKSGKRTTYAWNVRYGRYSPAEGTAPQWQRTQEYWRQVEESVTRNLMERLFQERFPW

SEQ ID NO: 1530 - protein, 1505 aa, unidentified
  REGION 1..1505: note = Cas Enzyme sequence
MPQEKSIFDKFTNLYEVLKTLRFELKPVGKTLHNMQNDFEYDENIQTFLKDQRIEDAYQTLKPMVDKFHEEFITDSLQSETAKRINFVEYVGVRREIIGHQKNLKKIQKQKRDEGKDDDIAKELKKKIDSASKLIETLEKKYRTDIGEAFTKTGNYWKEKKYKNYDWKIRSKVAQGEKILSSQDVLNLIGDTEKDEKIQNALKEFQGFFTYISGFNQNRKNYYEIKKEASTAVATRVVHENLPKFSDNTVIFEARKGEYLGAYNTLKKLGRELVNRDKEPLLPITEDIFKESYFTNCLTQDEIEQYNKRIGNANFLINLYNQAKRGENNFNKLTLFKTFYKQIGCGKKKPLFFTLTHERKTEAESAREKNPAKKVFSVEEMLAVTKSAGETYLKNNSKNGQIETVPDFLKYINVRENFEGVYWSKMALNTVSNLYFADWSTLKEKLKAAKIFVKPDKRSEGDVKIPPVIELEALFSVLDKVEDEVWRNEGVFFKNSITEKVKDESKNQKNQKRQAIISQAKSPSRALLNLILDDIQEYSQDFVNNATDVEKITQVYFSAQGKEQGEKRQRWVETIKAWIDNACNANAMLKYFLVKENKIKGNPLDSEIANGLKNILFESKVKIDAPSGGEETVNWFKWRDALRNFLTKKPQDDAKENKLKLNFENPSLASGWDVNKEKDSYCVIFQNNEKRLFLAVSSSKYKNAFELKLTEGRGKNKTEKNNPLFKVGDGEICLKMEYNFWADVSKMIPKCSTQLTAVEKHFRRDDTDFIFPIGYKVTSGEKFTQECRITKEIFDLNNKIYKKSDITGSEMRYSLTDSQEKHYVKAFQKEFWELLLKKKNLGKEFSNKELLIEWKKFCKKSPSELSEWEIKYKAPLTAWINFCKYFLARYPKTSLFEYTFKNSEEYNSLDEFYRDVDICSYKLKLEKKTNRLVLDQLVDKGQIYLFEIRNQDSNDGKWKNHKNNIHTFYWETVFKDILNRPKLSGRAKIFYRKALPTKDLKKKKVKSKDGKEKEVIENYRFSKEKFILHVPIVLNFCLNENKINDVVNDHFPENNELYFLGIDRGEKHLAYYSLVDKNGKLIKQKTLNLAFIDKDGKPRAVEAEKRTIGEGGKEKVDVVECWDYNQLLEARAGDRDYARKNWQTIGSIKNLKEGYISQVVRTIADLATKDGKPTYIVLENLNTGFKRSRQKIEKSVYQKFELALAKKLNFLIDKQTKIGKLGSVTKALQLTPPVNTYGDIEKKNQAGIMLYTRPNYTSQTDPATGWRKSIYLKKGSEEYIKDQILGNKTKKINPAFSEIAFDGKDYCFSYQDKNTDKTWKLYCGNNGVGLTRFRNERNLKGKWVAELQDVVAILNGVFEKLNTNKSLLEQMKAGVELTKLQDEKYAKYTAWESLRYAIDLIQQIRNRGTTERDSDFILSPVRDENGNHFDSREYWDREQAGQECNMPTSGDANGAFNIARKGVVMNEHIKRGFDLYITDEEWDVWLSGEKAWSQWIKENLNKRKK

SEQ ID NO: 1531 - protein, 1505 aa, unidentified
  REGION 1..1505: note = Cas Enzyme sequence
MATENGKEQPSVTTQRAYTLRLCGLDKHDNTWRDRLWNTHEAVNKGAKAFGDWLLTMRGGLCHTLAEVDIPGIGKKLARNPTQQEIKNRRIVLALSWLSVESIHGAPESHLVSHDLDTVTGERKNWKTVDALHEILRSRHLCEEEVNQWVVDCRDSLSAKIREDAVWVNRSKAFDLAKARKGASLSREDIWDFLQPFFGNNYSYLKMKTAVTNTSENSEADSEESKDEPSEEKAKDLSQKAGQWLSSRFGTGTGADFCRFYEVYDAMAKHCQNIQAGVSGAAVCGSLADALHGFSPSSRSINGILELISGPGYKSATRNVLQQINNMQSVSQLDIDRVRDASEKDAQQSREKVGGKGSRPYANAVLQDVEAASSITYHNAGNGPSHHWQYAVILDHAARRVSMAHSWIKRAEEERSKFEIEKDKLQCVPSDARAWLDAYCARRSSESGAIDAYRIRRSAVDGWKQVVAEWAALLAKAKNAGSEPPSEAESARIQAARKLQDTIEKFGDIQLFESLSLPDAKCVWLTNGKPDAQPLMDYVAGTDAVSKKQRFKVPAYRHPDAFLHPVFCDFGNSRWSIDYAVHRAPEKLARAQQLLEKKKEELTRAEQALSKASDPSKRSSIEKKLKTLNVAFKQQEAEVLWLESHHAMTMGLWNGSRIEDTPLLWQSKRFGSDIGQAGAEHPLVASRADRFGRAVAMAKDNAPVVPSGLFDLADWNGRLQAPRRQLDAIAAIHDRTDLSVEEKRQLVAKRIRTIRWLVTFSAKLQSRGPFIAYAAQHGFDWRYGAHGIENKSREGLAKLVLCRLPGLRILSVDLGHRYAAACAVWETLSAAQMQNACLEAGMEAPSQRTLYLHLKHFVNGKEKKTIYRRIGADTLPDGSPHPASWARLDRQFLIKLQGEDRDARPATCDEVVAVEQLETELGYVRPIKRKGREHLVDELMSDALRTLRLGLQRHGARARIAFNLTATKRTRPGGIQELLDQESRIGLLTETLLEWNELYAGERWADELARDMWNKHIQPLLGGTILQETNNQDVTPSAAKRRMQREETREKLRPVAKQIAENDSLCRQLNVLWSTRWQIEDAAWRMRLRWMRRWLLPRGINRDPQFRKSIRDVGGLSLIRIASFKSLYQVQKAYWMRPHPDDLRRNIPERGDSSLTSFGQRVLDAMERMRENRVKQLASRIAEAALGIGDETSVNAKNGRQKRPTERSNDPRFAPCHAVVIEDLTHYRPDETQTRRENRQLMSWSSSKVKKYLGEACQLNGLYLREVPPAYTSRQDSRTGAPGLRCNDVTVAEFYTSRFWRKQVEAAEKNQKDGKKGDARERYLLSIDERIRSEANDRDVFRIPVKGGEIFVSACGQDGGSNANRKAPPGLQADLNAAANIGLRAIFDPDWEGRWWYIPCDATTICPVAKKFNGCKAVDSSKPLRIVAEKVAVSSSGIDEKRSGRKGIALTDGSRIVNLWRDPSGAPIRRDVPSNSEWQDYAEYWNKVQSRVIANLRKSYGLREI

SEQ ID NO: 1532 - protein, 1505 aa, unidentified
  REGION 1..1505: note = Cas Enzyme sequence
MATENGKEQPSVTTQRAYTLRLCGLDKHDNTWRDRLWNTHEAVNKGAKAFGDWLLTMRGGLCHTLAEVDIPGIGKKLARNPTQQEIKNRRIVLALSWLSVESIHGAPESHLVSHDLDTVTGERKNWKTVDALHEILRCRHLCEEEINQWVVDCRDSLSAKIREDAVWVNRSKAFDLAKERKGASLSREDIWDFLQPFFGNNNSYLKMKTAVTNTSENSEADSEESKDEPSEEKAKDLSQKAGQWLSSRFGTGTGADFCRFYEVYDAMAKHCQNIQAGMSGAAVCGSLADALHGFSPSSRSINGILELISGPGYKSATRNVLQQINNMQSVSQLDIDRVRDASEKDAQQSREKVGGKGSRPYANAVLQDVEAASGITYHNACNGPSHHWQYAVILDHAARRVSMAHSWIKRAEEERSKFEIEKDKLQCVPSDARAWLDAYCARRSSESGAIDAYRIRRSAVDGWKQVVAEWAALLAKAKNAGSELPSEAESARIQAARELQDTIEKFGDIQLFEALSLPDAKCVWLTNGKPDAQPLMDYVAGTDAVSKKQRFKVPAYRHPDAFLHPVFCDFGNSRWSIDYAVHRAPEKLARAQQLLEKKKEELTRAEQALSKASDPSKRSSIEKKLKTLNVAFKQQEAEVLWLESHHAMTMGLWNGSRIEDTPLLWQSKRFGSDIGQAGAEHPLVASRADRFGRAVAMAKDNAPVVPSGLFDLADWNGRLQAPRRQLDAIAAIHDRTDLSVEEKRQLVAKRIRTIRWLVTFSAKLQSRGPFIAYAAQHGFDWRYGAHGIENKSREGLAKLVLCRLPGLRILSVDLGHRYAAACAVWETLSAAQMQNACLEAGMEAPSQRTLYLHLKHFVNGKEKKTIYRRIGAETLPDGSPHPASWARLDRQFLIKLQGEDRDARQATCDEVVAVEQLETELGYVRPIKRKGREHLVDELMSDALRTLRLGLQRHGARARIAFNLTATKRTRPGGIQELLDQESRIGLLTETLLEWNELYAGERWADELARDMWNKHIQPLLGGTILQETNNQDVTPSAAKRRMQREETREKLRPVAKQIAENDSLCRQLNVLWSTRWQIEDAAWRMRLRWMRRWLLPRGINRDPQFRKSIRDVGGLSLIRIASFKSLYQVQKAYWMRPHPDDLRRNIPERGDSSLTSFGQRVLDAMERMRENRVKQLASRIAEAALGIGDETSVNAKNGRRKRPTERSNDPRFAPCHAVVIEDLTHYRPDETQTRRENRQLMSWSSSKVKKYLGEACQLNGLYLREVPPAYTSRQDSRTGAPGLRCNDVAVPEFNSSRFWRKQVEAAEKNQKDGKKGDARERYLLSIDERIRSEANDRDVFRIPVKGGEIFVSACGQDGGSNANRKAPPGLQADLNAAANIGLRAIFDPDWEGRWWYIPCDATTICPVEKKFNGCKAVDSSKPLRIVAEKVAVSSSSINEKRSGRKGIALTDGSRIVNLWRDPSGAPIRRDVPSNSEWQDYAEYWNKVQSRVIANLRKSYGLREI

SEQ ID NO: 1533 - protein, 1505 aa, unidentified
  REGION 1..1505: note = Cas Enzyme sequence
MTIPDFRMVESNRASRWALPMAKPIERPTTRRAYTLRLRGNTPQDCTWRDALWATHEAVNKGAKVFGDWLLTLRGGIDHALADGPVKQKGDTTRSATSLERRDRRILLALSWLTVEDARGAPADESLIVARGTDNAEVRLQKLVAALDAILKARGVADMERGDSKRLAADQRGTWLGDCIPSLAAAIRDDAVWVNRSKAYDNVQNRLSMTRDEIWDFLEPFFAGVDAYLAAAESEVTQGDVPAANTPEKAKDLCQKAGGWLSKRFGTGIGANFRQMAQVYSAICTWAGQHKAFDSGTNAIESLAKSLNSFSPAPQDAKGILKLISGRGHKSATQNIIAAWADSPASITAEAIARLAETAGSDRDKCSTKADGKGRRIYSDTILNAVETVCGLTYLQDHGPARHYEFSVILDHAARRVNVVHSWIKNAEAERRAFENDSTRITQVPEPALRWLRGYCESRGNISGSLDTYRLRRRAIDSWDKVVERWSHSRCETKEDRIAEARQLQDDPSIDKFGDIQLFEALASDDALCIWNTPEGPNPQSLKDFVAATEADDKKRRFKVPAYRHPDALRNPVFVDFGYSRWHIDYSAHRRPVKSVQLREHLAAHNATVTEIREKMLRATESRKASLMKRLEDAIAQQRECEQAVTELDDHYRVMMKLWTGQAVASVPMRWSCKRLTADLALRNPPAVTSDQPGGVSRADRLGRAANHVGTDESMTILGLFEQADWNGRLQAPRDQLDRIARHVEKHGWDAKAARLVGRLKWLVSFSAKLTQQGPWTTYCQLFDQNSHSLPFISSKGDCAVKHATNDSRHGQARLILSRLPGLRVLAVDLGHRYAAACAVWEAVTSKQVQSECQSAGVDAPDCLAMFIHLKQTTKQGKTTTTVFRRIGSDQLPNGDAHPAPWARLDRQFLIKLQGEDRSPRASSIEEMHRVEEFETWTGLQRDQNTRLRARAVDHLMNQTVRTARLALARHGRRSRIAFQLLSNMRILPGGRRQALSDAGENDLLIDTLLDWHALATDARWSDLSARQLWNSSVATLDGGLAVAAVSVMDRTPAERRQDEEVLRRQLAPLAAQLQTNRDLRHKLSAAWTERWTSDDQQWRRYLRWLARWLLPRGGSRQDGGRRHVGGLSLGRISTLTEFRRKVQVAYFTRLRPDGKCAEIGRFFGQSTLDAIQRLKDQRVKQLASRIVEAALGIGCEKKSANGRDLPRQTSVGTARRFAPCHAIVIEDLSHYRPEETRTRRENRNTMDWKSAETRKRLSDHCQLYGLCLRDIPPHYTSRQDSRTGAPGLRCVDVPIADFLSQPWWRKQVLLAQKKAVANQGDARDRYLLSLEHRWARASDVDRGKVGALRIPMNGGELFVSADAQSPLARGIQADLNAAANIGLRALTDPDFPGKWWYVPCDATTKEPHPEKVKGSIVDGIGPLATCDSKASDGGPPMRRKRSSKSSKEKPIVNLWRDAQAGPIDGAANLDVWTVTAAYWNLVKVRVIENLEKAVNGQRNELSGR

SEQ ID NO: 1534 - protein, 1508 aa, unidentified
  REGION 1..1508: note = Cas Enzyme sequence
LIERQIEWVKTGWVEHFQDNSRRVSALGVKVPQQLNQRIIGMNRIYQGRVSKVEIPNPGDKENPWQPLPDWPIKLWRHHELFQDAVNYYTVCLLALASSEVNPLTKIRHRIEATAGEPEKEHHVWTKVSRKGAVRLGLRDSVTKYLTPENKQSTPQECFVAALKGNETSAEVLDLALLLLLTKTNGDSSIQKNGNSYAPRFFRPLNKPKWDFSANAVQASAGRNTFLTELHSDGADWDAIAIKYSLENVVSLQPDADLLKGQAAQQRLTDSLNWMLKAAKGEHPKNESEPLNKAQRWLADQAGCVELLQSALATVGNLELEIPPNRGGNINLDQLHGFTVFKYAPSVRSIAAGFLKVVLAPARPKAGKKTSDDAPEEKESDLVAYVREECLKLGDDPIRLARGKRNFVFRAFTSLQGWQVQENNANEPAWLEFDIAAFKYALTTLHQIEVKAKERKEKKEKIDQRLRAMRDAGIRAGWKVAAESESDDRPPLLAGDERITRLEAALASLPVVQDLCDVEGQTPEYGLLPRTIRGFADLNERWNKRPELKQATSPNAELRDKVLIPELNAFQTENIETVGSVALFRALAEPDNWIVWKKPDAETQSKWKGNGFADDPLEALTEERELQTESKRLAEAIRFTPADPIYSRRQFDFKATVGAAFPTKQYFHEPNALQVSVPLAYCGPDGLLAPQRVRLCYTSPRLLRDGLRKMDGETLDQEPWSQPMMEAFGLKEEAIQTLTECPIALMPEQLSDGEKRFLLNFPVTLDPLAVQRTVFKTAGRENLFNTRYDAKSKKTVFQSYWKRQCAGMDDKLFYLRWPANKWPAGKEADAWYNQMTGFKCVSVDLGQRDAGAWALIEAKDTADFGQTKIGSRPSRQIGIAGGKTWHAAVQATGMFKLAGEDIFLRRQRTVLDDRDPDDKEPGPAVREEFHGGRGRSATEPEWKDSQAFCKRLGFDPDAVLGKDINTKSFPELNDDLLFVLRHAQSRLARWQRWSWMVQDEARQKEVLGEIREAKDTPIAWIDAGKQIPVLGEAMKSEILNLRRMLCRELELVANRILPLRGRKWEWAARTNRPDCRVLRETEPETDTEDKRLRGQRGLSLKRIQQLAELRRRCQSLNRSLQHTPGERSRDGASRRGIELPDPCPDILAKIDNIKEQRIHQLAHDILAQALGLKLRVHQVDAARREQHDRHGEYERIPGRAPVDFIVIEDLEFYATTQRRAKSENAKLMMWSRRELRKKLIELCETYGVPVVETSPDYTSKFDARTGGPGFRATEITPDSRKEPRWRKMLDRWDRHLKGEKISDPKSREEHKRIAELFALLDAANRGRRSSDNHNPWHTLFVPQRGGTLFIAAAGSGGPVQADINAAINLGLRAIAAPDCHEIHSRIRLEHEDGEYRPRRKSKREEARWKGVPKTIAFNFTKQPPPDLSDAFADLSKVAAYDHCHLPGLNLNFAGGRGFWDTVNKLEWSRCLAINAARLRKWGVEPPDGWEDSISPSTEKSVEEDDIPM

SEQ ID NO: 1535 - protein, 1510 aa, unidentified
  REGION 1..1510: note = Cas Enzyme sequence
MAVKTYKARIHFESLLKEPAQDPARFPNRAAELRQLLWDTHRAFNQGVRYLMQELVLMRRGAGVWRENSYGVWREWDKIKTYDQIVDIRRRMSATPSSVRLLENRELLDRFRQVVKSESEAVELANACSVIFDAICQPAEDGELVQMPRDDLDLLTNLNSTAKGIRERGKTKEGTDKKKSGRKSSWPMDKAAWETAKTSDSSAHFLEKLKQHPDLKDAFGNLSSGGSKKLEYYKKLAGSAPWKESQSVILEKAARWKEAKQEREEKEQDSSEHGSKAAYRRLFDAGCLPMPEFAKYIDENQIEFGDLKLSDCGAEWKRGMWNQAGQRVRSHMGWQRRREKENAVYSLRKELFEKGGAIRRKKSEELTPEDILPGKAAPDQNDWQERPAYGNQMWFIGLRSYEENEMAKYAEEAGMGSRSAPRIRRGTIKGWSKLRERWLQILKRNPQATRDDLIGELNALRSQDPRAYGDARLFDWLSKTDQRFLWDGFDADGKILCGRDDRDCVSAFVAYNEEFADEPSSITLTETDERLHPVWPFFGESSAVPYEIEYDLETACPTAIRLPLLVGKENGGYAERQGTRLPLAEYADLASSFQLPTPVRLDVLVEIREVTRAGRKVTCPFSYFKQNGVWYVREGEIPSGESIQIKQTDRKIENGKIFISSKLRMAYRDDLMVSPATGDFGSIKILWERIELASHVDQKKLPETAPARSRVFVSFSCNVVERAPRKQLTRKPDAVVVTIPSGVDQGLVVVSTDVRTGKSKSSSAPPLPPGSRLWPADAVHGDPPLRILSVDLGHRHSAYAVWELGLQQKSWRAGVLKGSTQTPVYADCTGTGLLCLPGDGEDTPAEEESLRLRSRQIRRRLNLQNSILRVSRLLSLDKFEKTIFEQSDVRDRPNKKGLRIRRRCRTEKTPLSEAEVRKNCDKAAEILIRWADTDAMAKSLAATGNADISFWKYMAVKNPPLSAVVDVAPSTIVPDDGPDRETLKKKRQEEEEKFASSIYENRVKLAGALCSGYDADHRRPATGGLWHDLDRTLIREISYGDRGQKGNPRKLNNEGILRLLRRPPRARPDWREFHRTLNDANRIPKGRTLRGGLSMGRLNFLKEVGDFVKKWSCRPRWPGDRRHIPPGQLFDRQDAEHLEHLRDDRIKRLAHLIVAQALGFEPDIRRGLWKYVDGSTGEILWQHPETRRFFAEGAAGELREVSRPAEIDDDAAARPHTVSAPAHIVVFENLIRYRFQSDRPKTENAGLMQWAHRQIVHFTKQVASLYGLKVAMVYAAFSSKFCSRCGSPGARVSRFDPAWRNQEWFKRRTSNPRSKVDHSLKRASEDPTADETRPWVLIEGGKEFVCANAKCSAHDEPLNADENAAANIGLRFLRGVEDFRTKVNPAGALKGKLRFETGIHSFRPPVSGSPFWSPMAEPAQKKKIGAAAPGADVDEAGDADESGVVVLFRDPSGAFRNKQYWYEGKIFWSNVMMAVEAKIAGASVGAKPVAASWGQAQPQSGPGLAKPGGD

SEQ ID NO: 1536 - protein, 1510 aa, unidentified
  REGION 1..1510: note = Cas Enzyme sequence
MAMQTIVTQRAYTLRLKGSDPQDQSWREALWQTHEAVNKGAKAFGDWLLTLRGGLCHTLERLPDITDSEIDSEHERAKHDAKENNKSEPTREDIAKKLHVKREQENQPDAIRDRRILLALSWLSVESERGAPAEYIVAHDLDKQSGKRSNWKTVEALKEILKKRGVDDEKEIQEWEKDCRESLAAHIRDDAVWVNRSQAFEEAARSTGISLTHDAIWDMLERFLGSAGTYLEPADISDDEASGSKNEESKDLVQKAGGWLCDRFGTGKGADFGRMAKAYDAIADWASEARTEASGTEIVAALASALKEFNPKSNDLPGLLRLISGPGHKSATRNLLRQIDGQSLVTRQNLDKLKEMAIDDAEKCRKREGSKGRRPYSDTILKDVESACKFTYLTDNGAARHSEFAVMLDHAARRVSLAHTWIKRAEAARRKFEEDARRMDSVPSETRTWLDEFCVERSGASGAQDQYRIRPRALGGKTRKAWKAIVQAWAKPDCQAEEDRVEAARLIQAEWDDDEKFGDIQLFEALADDDALCVWQKDGDSAKSPDPQHLIDYVLAADAIQKRHFKVPAYRHPDALLHPVFCDFGTSRWDIGFAIHEASDGVCKAKKNVERKKNAVQKAERSVKKASGNRQKEAKAQDELKKRQADLAEAETRMAWLSNMHALSMTLWTGSMVKSEPSLLWQSKRLTHDLAFDQGKPDGKVLEVTRADRLGRAAGNVPVNVSVAIAGLFEQNDWNGRLQAPRSQLDAIAARVAKHGWDAKAKQMRNHLRWLITFSAKLQPSGPWVKYAAGVPEDAVAKPFVSRKGDYAVRHQGNDTREGHAKIVLSRLPGLRVLSVDLGHRYAAACAVWETLSPEQLKAACQAVGHEPPRDGDLYLHLKNGEQTVVYRRVGADAIEAVDEGTGKVKTISHPAPWARLDRQFLIKLQGEDREVRRAIPAEVAAVQELEKTVGRESPDRRYLRVDDLMSETVRSVRLALQRHGRRARIAFNLTASKKLLPGGREECLTDEGRAALLADTLADWYALLTGKGWTDEWAKQQWETHVVPFLQSAALPQIPEDAETTPKARRKYRADLTEKLNPTAVSLAKNESLCRKLHCLWATRWREDDAALRKRLRWLRDWILPRGRAEDNRAIRHVGGLSLTRIATIKSLYQVQKAFRMQPEPDDLRKNIPSKGDDTLRDFGRSILDVMEHMREQRVKQLASRIAEAALGIGRMKRPKGGKDPKRPRARVDEPCHAVVIENLTNYRPEETRTRRENRQLMTWSSAKVKKYLAETCQLNGLHLREISANYTSRQDSRTGAPGIRCQDVTIKEFMQSPFWRKRVAQAEKKQAEGKGDAHERFLCDMNAKWKDKPEADWERAVAVRVPLKGGEIFVSANAESPVAKGLQADLNAAANIGLKALLDPDWPGRWWYVPCDPTTFKPAKDKVAGSTAICLDKPLKSVSAVQDMDGPEKKRGKAGEKSREIVNLWRDVSSHPIDSDEGWRESRDYWGDVEKRVLDILRESVEKDSIPF

SEQ ID NO: 1537 - protein, 1513 aa, unidentified
  REGION 1..1513: note = Cas Enzyme sequence
MAVRGQEEMATENGKEQPNVTTQRAYTLRLSGLDKHDNTWRDRLWNTHEAVNKGAKAFGDWLLTMRGGLCHTLAEVDVPGIGKKPVCLPTRQEIKNRRIVLALSWLSVESFHGAPESLLVSHDLDMAAGERKNWKTIDALHEILRRRGLCEEQIDQWAIDCRDSLSAKIREDAVWVNRSKSFDLAKAKIRESLSREDIWDFLQPFFGNKYSYLKMKTAVTTTSEDFEADAEESKDESSEEKAKDLSQKAGQWLSSRFGTGTGADFSRFCEVYDAIANYCHNIQAGVSGTEVCGSLADALHEFSPRSMNINGILELISGPGYKSATRNVLQKINNLQSVSQLDLDRVHDASVKDAQQSREKVGGKGSRPYANAVLQDVEAACGITYHNTDNGPSHHWQYAVILDHAARRVSMAHSWIKRAEEERGKFEIEKDKLLRVPADARVWLDAFCTRRSSESGAIDSYRIRRSAIDGWKQVVAAWAALPTEAEDKDSVLPSAAESARIQKARELQDTIEKFGDIQLFEALSLPDAKCVWLTNGKPDAQPLMDYVAGTDAVSKKQRFKVPAYRHPDAFLHPVFCDFGNSRWSIDYAVHRAPEKLARAQQLLEKKKEELTRAEQALSKASDPSKRSSIEKKLKTLNVAFKQQEAEVLWLESHHAMTMGLWNGSRIEDTPLLWQSKRFGSDIGQAGAEHPLVASRADRFGRAVVMAKDNAPVVPSGLFDLADWNGRLQAPRRQLDAIAAIHDRTDLSVEEKRQLVAKRTRTIRWLVTFSAKLQSRGPFIAYAAQHGFDWRYGAHGIENKSREGLAKLVLCRLPGLRILSVDLGHRYAAACAVWETLSAAQMQNACLEAGMEVPSQRTLYSHLKHFVNGKEKKTIYRRIGADTLPDGSPHPASWARLDRQFLIKLQGEDSDARPATCDEVVAVEQLETELGYVRPIKRKGREHLVDELMSDALRTLRLGLQRHGTRARIAFNLTATKRTRPGGIQELLDQESRIGLLTETLLEWNELYAGERWADELAMDMWNKHIQPLLGGTILQETNNQDVTPSAAKRRMQREETRKKLRPVAKQIAENDSLCRQLNVLWNTRWQIEDAAWRMRLRWMRRWLLPRGINRDPQFRKSIRDVGGLSLIRIASFKSLYQVQKAYWMRPHPDDLRRNIPERGDSSLTSFGQRVLDAMERMRENRVKQLASRIAEAALGIGDETSVNAKNGRRKRPTERSNDPRFAPCHAVVIEDLTHYRPDETQTRRENRQLMSWSSSKVKKYLGEACQLNGLYLREVPPAYTSRQDSRTGAPGLRCNDVTVAEFYTSRFWRKQVEAAEKNQKDGKKGDARERYLLSIDERIRSEANDRDVFRIPVKGGEIFVSACGQDGGSNANRKAPPGLQADLNAAANIGLRAIFDPDWEGRWWYIPCDATTICPVAKKFNGCKAVDSSKPLRIVAEKVAVSSSSIDEKRSGRKGIALTDGSRIVNLWRDPSGAPIRRDVPSNSEWQDYAEYWNKVQSRVIANLRKSYGLREI

SEQ ID NO: 1538 - protein, 1513 aa, unidentified
  REGION 1..1513: note = Cas Enzyme sequence
MAVRGQEEMATENGKEQPSVTTQRAYTLRLCGLDKHDNTWRDRLWNTHEAVNKGAKAFGDWLLTMRGGLCHTLAEVDIPGIGKKLARNPTQQEIKNRRIVLALSWLSVESIHGAPESHLVSHDLDTVTGERKNWKTVDALHEILRSRHLCEEEVNQWVVDCRDSLSAKIREDAVWVNRSKAFDLAKARKGASLSREDIWDFLQPFFGNNYSYLKMKTAVTNTSENSEADSEESKDEPSEEKAKDLSQKAGQWLSSRFGTGTGADFCRFYEVYDAMAKHCQNIQAGVSGAAVCGSLADALHGFSPSSRSINGILELISGPGYKSATRNVLQQINNMQSVSQLDIDRVRDASEKDAQQSREKVGGKGSRPYANAVLQDVEAASSITYHNAGNGPSHHWQYAVILDHAARRVSMAHSWIKRAEEERSKFEIEKDKLQCVPSDARAWLDAYCARRSSESGAIDAYRIRRSAVDGWKQVVAEWAALLAKAKNAGSEPPSEAESARIQAARKLQDTIEKFGDIQLFESLSLPDAKCVWLTNGKPDAQPLMDYVAGTDAVSKKQRFKVPAYRHPDAFLHPVFCDFGNSRWSIDYAVHRAPEKLARAQQLLEKKKEELTRAEQALSKASDPSKRSSIEKKLKTLNVAFKQQEAEVLWLESHHAMTMGLWNGSRIEDTPLLWQSKRFGSDIGQAGAEHPLVASRADRFGRAVAMAKDNAPVVPSGLFDLADWNGRLQAPRRQLDAIAAIHDRTDLSVEEKRQLVAKRIRTIRWLVTFSAKLQSRGPFIAYAAQHGFDWRYGAHGIENKSREGLAKLVLCRLPGLRILSVDLGHRYAAACAVWETLSAAQMQNACLEAGMEAPSQRTLYLHLKHFVNGKEKKTIYRRIGADTLPDGSPHPASWARLDRQFLIKLQGEDRDARPATCDEVVAVEQLETELGYVRPIKRKGREHLVDELMSDALRTLRLGLQRHGARARIAFNLTATKRTRPGGIQELLDQESRIGLLTETLLEWNELYAGERWADELARDMWNKHIQPLLGGTILQETNNQDVTPSAAKRRMQREETREKLRPVAKQIAENDSLCRQLNVLWSTRWQIEDAAWRMRLRWMRRWLLPRGINRDPQFRKSIRDVGGLSLIRIASFKSLYQVQKAYWMRPHPDDLRRNIPERGDSSLTSFGQRVLDAMERMRENRVKQLASRIAEAALGIGDETSVNAKNGRQKRPTERSNDPRFAPCHAVVIEDLTHYRPDETQTRRENRQLMSWSSSKVKKYLGEACQLNGLYLREVPPAYTSRQDSRTGAPGLRCNDVTVAEFYTSRFWRKQVEAAEKNQKDGKKGDARERYLLSIDERIRSEANDRDVFRIPVKGGEIFVSACGQDGGSNANRKAPPGLQADLNAAANIGLRAIFDPDWEGRWWYIPCDATTICPVAKKFNGCKAVDSSKPLRIVAEKVAVSSSGIDEKRSGRKGIALTDGSRIVNLWRDPSGAPIRRDVPSNSEWQDYAEYWNKVQSRVIANLRKSYGLREI

SEQ ID NO: 1539 - protein, 1513 aa, unidentified
  REGION 1..1513: note = Cas Enzyme sequence
MAVRGQEEMATENGKEQPNVTTQRAYTLRLSGLDKHDNTWRDRLWNTHEAVNKGAKAFGDWLLTMRGGLCHTLAEVDVPGIGKKPVCLPTRQEIKNRRIVLALSWLSVESFHGAPESLLVSHDLDMAAGERKNWKTIDALHEILRRRGLCEEQIDQWAIDCRDSLSAKIREDAVWVNRSKSFDLAKAKIRESLSREDIWDFLQPFFGNKYSYLKMKTAVTTTSEDFEADAEESKDESSEEKAKDLSQKAGQWLSSRFGTGTGADFSRFCEVYDAIANYCHNIQAGVSGTEVCGSLADALHEFSPRSMNINGILELISGPGYKSATRNVLQKINNLQSVSQLDLDRVHDASVKDAQQSREKVGGKGSRPYANAVLQDVEAACGITYHNTDNGPSHHWQYAVILDHAARRVSMAHSWIKRAEEERGKFEIEKDKLLRVPADARVWLDAFCTRRSSESGAIDSYRIRRSAIDGWKQVVAAWAALPTEAEDKDSVLPSAAESARIQKARELQDTIEKFGDIQLFEALSLPDAKCVWLTNGKPDAQPLMDYVAGTDAVSKKQRFKVPAYRHPDAFLHPVFCDFGNSRWSIDYAVHRAPEKLARAQQLLEKKKEELTRAEQALSKASDPSKRSSIEKKLKTLNVAFKQQEAEVLWLESHHAMTMGLWNGSRIEDTPLLWQSKRFGSDIGQAGAEHPLVASRADRFGRAVVMAKDNAPVVPSGLFDLADWNGRLQAPRRQLDAIAAIHDRTDLSVEEKRQLVAKRTRTIRWLVTFSAKLQSRGPFIAYAAQHGFDWRYGAHGIENKSREGLAKLVLCRLPGLRILSVDLGHRYAAACAVWETLSAAQMQNACLEAGMEVPSQRTLYSHLKHFVNGKEKKTIYRRIGADTLPGGSPHPASWARLDRQFLIKLQGEDSDARPATCDEVVAVEQLETELGYVRPIKRKGREHLVDELMSDALRTLRLGLQRHGTRARIAFNLTATKRTRPGGIQELLDQESRIGLLTETLLEWNELYAGERWADELAMDMWNKHIQPLLGGTILQETNNQDVTPSAAKRRMQREETRKKLRPVAKQIAENDSLCRQLNVLWNTRWQIEDAAWRMRLRWMRRWLLPRGINRDPQFRKSIRDVGGLSLIRIASFKSLYQVQKAYWMRPHPDDLRRNIPERGDSSLTSFGQRVLDAMERMRENRVKQLASRIAEAALGIGDETSVNAKNGRRKRPTERSNDPRFAPCHAVVIEDLTHYRPDETQTRRENRQLMSWSSSKVKKYLGEACQLNGLYLREVPPAYTSRQDSRTGAPGLRCNDVTVAEFYTSRFWRKQVEAAEKNQKDGKKGDARERYLLSIDERIRSEANDRDVFRIPVKGGEIFVSACGQDGGSNANRKAPPGLQADLNAAANIGLRAIFDPDWEGRWWYIPCDATTICPVAKKFNGCKAVDSSKPLRIVAEKVAVSSSSIDEKRSGRKGIALTDGSRIVNLWRDPSGAPIRRDVPSNSEWQDYAEYWNKVQSRVIANLRKSYGLREI

SEQ ID NO: 1540 - protein, 1515 aa, unidentified
  REGION 1..1515: note = Cas Enzyme sequence
MPDKQKNSSGGAFDEFVGKYALSKTLRFELKPVPRTRQLLELDKNNIFPKDKYRAENYAIIKKYIDKLHAKFINAALALPEAYIDIKDSLKVTESEAEDESVDEEQSVESDDGEEKGAKSKDHKKVIDLFNQLSKADKIGDKPDEFNGWVKVEKNKVSGKLFNKELIDILRIEFSDELEADINVPVLFFNKDEKGKKRKLKEVFNSFGALGKGKDKEGQNFTTYFSSAFHDNRRNYYKADGKAGRVATRIADENLTRFCTNLEKFGVIQSKLPKLLNKFNQGWTEYFKEKGMAEEGWVKQFDESKWQDEVFGIKYRHFLQADINRYNFITRKLNKDINESGVQSDNFQKLHKQVHGEVKKQDEEFEVDKDNIFSPTDSFIKKFITHSRLKLEFSREIFFQFLNEKFLDPKNVFLSSRAITTISNKCFVSWHTFGGKILEYLNNGKPEKKQRKKLPDFVDLQTVKNVLDAGKDVLLLDMFKYRYFEVIDPNDEQRKNEREELEVLRQKLCEGEHWKNFLRIVKFEFESLVVIHNETAQKLLAETVYKKGNKDFSKSEQDKQVDILFDFAESANGILNMTKYFALRKKGVMVEKKEYANRDEIHEQVEAYLDGDNEQQERCLINGYYKALKHFITKKPWTEDKVVLNFNNAQFLQGWPQSQEKVKCGVILKKKQNDRDLYYLVVLEDKNYFENKDLYKDIKSSAWQKMVYTQLQNPSRMLPKIFITPFLVASGDNKAEEKWEGIDRGQSGAKDKIKIGIQPTDEILNGYIQGKHKKQKKINPDPKFLQKYFDFLKDAIRKYYDKEFSFPDTKGFLDTSLFYAWVEENVYDIQTVNISDNTINDLVVNPKNKKQVYLFQIYNKDFEIDEEIGRAKYGHGFLTKAEWRKQAERNEEEKEQGRENLETTFFKLLFDAKNLKNDDGVVYKLSGGAKMFYRPASESLEKKKVKDKDGQEKEVFDRQRYKEDKFLLRVPIVINFVNKREGYKINEDVNKLIAQTPFGHDKFRIIALDRGEKNLAYLSVLNEDGKILEMRSLNEIHRFGKDEKPIAEKNQYHDKDGNPVGEAKVEPFKDYHNLLDLREIERLKARKSWERIEKIADLKEGYLGFVVNKIANLVIKAIKEGKVPIVVLENLNVGMKQGRIMIDKQVYSKVEEKIAKKLSYLIDKKLGNFLEAWQLTPEIRTFGGDIESKSQVGIIFYVNPGYTSAICPACGFRKRKYIKTKKAQEEFKKINITFDGMKYKFEYSSEVKGINSGDGIIQDIVYSNVRRVVWDRQANNGKGGVDEIADVTEKITSLFEKFKIEKTTDINKQLQDLNFSIKEEETKFWVQLCKWFHCVQEVRNSVNKRRKFKEDDANGEIEEWGENRDFIFCSHCYFDSEDEREWNELKEKIYIGHDSEQVKFNGDANGAYNIGRKGIMEIEKVIKYYSELDKFKKYWSILRLPKKDEKIPFVKDGNEYVLTMLNDKKKQPYYCVLKFKKESIEAISAERKMRRYPDLLISDSDWDEWLAKNSPAHSQ

SEQ ID NO: 1541 - protein, 1515 aa, unidentified
  REGION 1..1515: note = Cas Enzyme sequence
MNRIYQGRVTCVETPNPEYAAQRIRSAPAKRENRDAKTTQQQWKLLPDWQTALWQHHQLFQDAVNYYTLALAAMAAGVPGWAGEYSEEVQKKWDDFTRHGETRRGLRRSLARTLGMPESEASFKACTERILSGFEVSEEARRQLVEELFPDKKGKSTIQHAGTGDWPMLCWKDWEGESKSEKRIRKEWTCAKFLTALFRCPANEAAKLAADFPLDASGLTSLAKGRPDLDCEKAKEELERSAELLAGQLGDALFFSLLRKYCRLKEHAVDAALHSLRAEIRARGASFSSPPWTGGNKDMLPIRLFLLFKFAPSNPLTMPALKACLRKQYLSMLRRTVKPWTLGSLKKFLRTGTSGSAEGDTPHGDAIRAARGQRGFVFPAFTAISGWGVQPGQFAWKNFDMAAFEEAIKAPHQARLKNQERQKQLAETRERLRLMEGKGGVCRKADNDDADDLPGFSGDERIAIVRRIVENDLFDEDVGGGAGYGLHERTLRGYAELRRAWNEKVQPGEPYSKEKHEELDQIRRRHQTEHRDDAGDARLFAELLKPGNWCVWQTPTSDELIERRARNHSDDPLSDFQHYLELKAEAERLKNPISFTPADAQHSPRQFYFSEGAKFSSRGEFRHERKALAFTTQIALKHNGLWKPVRVRISYTAPRLRRDALREGFDDELESSRWVSPLLQALGISEPKERQDLSSCAVSLMPHWHQARPEPDTPPDALLLNFPIDLECVELQRAIYGFRGQSGPEFFRIPPDAKTKSKKAQGFWNYQFRGRKESKTFFPMWLSWPHEGPEAGEFRSWHEALSSFRCLAADLGQRDAGAFARLRAACEGSLDPRSSRFIGQTAGTRWRAAVERAGLFRLPGEDAIVWREKSSQDQNNPEDSGRPFAFREELWGERGRPARPWEADETAELMRLLEAVETDGEGEERWTLLPENWRTALSFPEQNDKLLIALRRYQSRISRLHRWCWFLRGDPRQQNTAVAEIDECDDRRLVSPELKALVANRDPRGREQLESQLRQRLDAAPRLLVRIANRILPLRGRSWRWEKHSRATDENPLHHLTQNGPKLDTPERPVWLRGQRGLSFERIEQLEELRKRCQSLNQALRRNIGGEPPIRRDESVPDPCPDLLEKLDNLKEQRVNQTAHLILAEALGLRLAPPPPNKSELRAERDQHGVYEKLLNPQRQWIGPVDFIVIEDLSRYRASQGRAPRENSRLMKWCHRAVRDKLKQLCEVFGLPVLETPAAYSSRFCSRSGVPGFRAVEVTAGFTRREQWAWLAGRKGDDGQPTDEARRLLDLDRDLAKAQAELERDWKEQKRSGRCPRRTLLVPSAGGPVFVPICDTTGGTDLQPALTQADLNAAINLGLRAIADPQLWSIHPRLRTQPDATETGRKGKPKPASRQAAGEARLLTREKRKFGAAGKVLVVHRPPDARPDDTRQPNFFADYAGLEQVARRLAQANREHAWLERQWTWAEVPGQEDSPRLVHSKSFWGCVKAAQWRRVQDINDARLARWKNKLDRLPD

SEQ ID NO: 1542 - protein, 1516 aa, unidentified
  REGION 1..1516: note = Cas Enzyme sequence
MAKTNLGAGKETLAVVSSEIDSATTQRAYTLRLRGTDATDNSWRDALWSTHEAVNNGAKTFGDWLLTLRGGMCHTLAGGAQSRRTLLALSWLSVESAPKKGDRHEKFVVACGGTDSQSSRDAKLLKRFREILVKRGVSGTELDSWVSDCAPSLSSAIRDDAVWVDRSEAFDNAFVQIGGSLTRDVAWDFLDPFFGNADAYLSSLSIEDDDESESKGKEEKAKDLGQKAGQWLSSRFGTGRGADFKLLARIYQKISTWSKSQSAFLDGKKALQTLAIFLTEYKPVSNDANGILKLISGPGYKSATRNIIEKFGTDVGTITLESLEKLRETSEKNAEESLRKTGGKGRRPYSDVIISEVEAACGFSYLQPDGPARHAEFSVMLDHAARRVSIAHTWIKRAEAERQNFKADAQKMSDVPAVAKIWLDIFCKERTLATNALEPYRIRKRALGGWKEVVTRWNRTACETVQNRIDAAREIQDDPDIEKFGDIQLFEAIAADETLCVWKPDGNASTQPLTDYSVATDAVAKQQRFKVPAYRHPDSLLHPIFCDFGNSRWEIKFAVHEAATKLEDARKRLVKKEADFISATERLTKAKTPEKTAIAKENIEAIRVEINQAGDAVQWLSTPHGITLGLWNGVSLNRVPKMSWSSKRLAKDLALRQMGVRGSLIRATRADRLGRAAAGATQDDVISVLNVFDQANWNGRLQAPRAQFAAIAKHVSKHGWDSKARQMRDRIRWLVTFSAALQSTGPWIDYVPLFNDRSPAKPFVTRKGEFAIKHADNDKRGTKLILSRLPALRILSVDLGHRYAAACAVWEAISSEQMIKESKKLNHRAPTSTDLYLHLKCNADPKKPRTTIYRRIGADTIKDSATGKVTPHPAPWARLERQFLIKLPGEQQQPRAASSKDAHGVNELQLVETLAKQIGQVVEGDTNKKERGVHELMARAIRLIALGLKRHARRAKIAYAFDPATKVILGMGASEKEFTEGDSAHIGFIADSLIEWHSLATDAKWNDKRARDLWNQHVSKIAGGWTIEDPKATEEVPTTRKQRTQSEDGLRLKMVPIGQQLAKVNRSAIHNAWKERWESDNGRAAKIDKATGQKTFDGTGFHASLRWVTDWIMGKNLIGATGDGWKQNVGGLSVTRITTMKALYQLHKAFAMRATPLKPRGAPEKGESNIGIAQSILTAMERMRDQRVKQIASRIAGSALGLGGKWVMRDIPANKAKNRSARTKLVWLEDLSPKYSPCHAVVIENLKNYRPDETRTRRENSQLMSWASSKVEKYLGEACQLNGLHLRSVSAGYTSRQDSRTGAPGIRCCDVSVKDFQNKPWWRKCVETAKQKNKDGKGNALDRYLENLNEQYSDKSTAITIGTQFIRIPVSGGDLFVSADHSSPAAKGLQADLNAAANIGLKALLDPDWEGKWWFVPCASVTNTPVTDKVKGSQVISNVALIPIVQGGTKPGRSKAGKKERDVVNIWRDPSALPIKADGNWFGSAEYWNKVRIRVIQVIQTKNNFTKLTSTQGMPW

SEQ ID NO: 1543 - protein, 1516 aa, unidentified
  REGION 1..1516: note = Cas Enzyme sequence
MAKTNLGAGKETLAVVSSEIDSATTQRAYTLRLRGTDATDNSWRDALWSTHEAVNNGAKTFGDWLLTLRGGMCHTLAGGAQSRRTLLALSWLSVESAPKKGDRHEKFVVACGGTDSQSSRDAKLLKRFREILVKRGVSGTELDSWVSDCAPSLSSAIRDDAVWVDRSEVFDNAFVQIGGSLTRDVAWDFLDPFFGNADAYLSSLSIEDDDESESKGKEEKAKDLGQKAGQWLSSRFGTGRGADFKLLARIYQKISTWSKSQSAFLDGKKALQTLAIFLTEYKPVSNDANGILKLISGPGYKSATRNIIEKFGTDVGTITLESLEKLRETSEKNAEESLRKTGGKGRRPYSDVIISEVEAACGFSYLQPDGPARHAEFSVMLDHAARRVSIAHTWIKRAEAERQNFKADAQKMSDVPAVAKIWLDIFCKERTLATNALEPYRIRKRALGGWKEVVTRWNRTACETVQNRIDAAREIQDDPDIEKFGDIQLFEAIAADETLCVWKPDGNASTQPLTDYSVATDAVAKQQRFKVPAYRHPDSLLHPIFCDFGNSRWEIKFAVHEAATKLEDARKRLVKKEADFISATERLTKAKTPEKTAIAKENIEAIRVEINQAGDAVQWLSTPHGITLGLWNGVSLNRVPKMSWSSKRLAKDLALRQMGVRGSLIRATRADRLGRAAAGATQDDVISVLNVFDQANWNGRLQAPRAQFAAIAKHVSKHGWDSKARQMRDRIRWLVTFSAALQSTGPWIDYVPLFNDRSPAKPFVTRKGEFAIKHADNDKRGTKLILSRLPALRILSVDLGHRYAAACAVWEAISSEQMIKESKKLNHRAPTSTDLYLHLKCNADPKKPRTTIYRRIGADTIKDSATGKVTPHPAPWARLERQFLIKLPGEQQQPRAASSKDAHGVNELQLVETLAKQIGQVVEGDTNKKERGVHELMARAIRLIALGLKRHARRAKIAYAFDPATKVILGMGASEKEFTEGDSAHIGFIADSLIEWHSLATDAKWNDKRARDLWNQHVSKIAGGWTIEDPKATEEVPTTRKQRTQSEDGLRLKMVPIGQQLAKVNRSAIHNAWKERWESDNGRAAKIDKATGQKTFDGTGFHASLRWVTDWIMGKNLIGATGDGWKQNVGGLSVTRITTMKALYQLHKAFAMRATPLKPRGAPEKGESNIGIAQSILTAMERMRDQRVKQIASRIAGSALGLGGKWVMRDIPANKAKNRSARTKLVWLEDLSPKYSPCHAVVIENLKNYRPDETRTRRENSQLMSWASSKVEKYLGEACQLNGLHLRSVSAGYTSRQDSRTGAPGIRCCDVSVKDFQNKPWWRKCVETAKQKNKDGKGNALDRYLENLNEQYSDKSTAITIGTQFIRIPVSGGDLFVSADHSSPAAKGLQADLNAAANIGLKALLDPDWEGKWWFVPCASVTNTPVTDKVKGSQVISNVALIPIVQGGTKPGRSKAGKKERDVVNIWRDPSALPIKADGNWFGSAEYWNKVRIRVIQVIQTKNNFTKLTSTQGMPW

SEQ ID NO: 1544 - protein, 1518 aa, unidentified
  REGION 1..1518: note = Cas Enzyme sequence
MIPIGKTKEIMPTLNNEKTYLEYDEQLAKDYVRMKEIIRYNHSKFINDILTYKNAKTIITTKNLKAYYDLFKKIQKEKKEQDRKEFENCQGTMKQALKKALTSADRYKELIGKKKENEENEENKKNKKTVQYYPRKGKYKGDDKKIIEKFENHKTYLSSYINNHIKPIYENKDKQGSICYRTINENLVIFFNNCKQYETHKDFETIIQNLYCEENKENTIAILESDLKNIFAPSYFNHLLTQKGIDRYNALIGGFTKEDGTKIQGINEQINAYNQKLKEKSDETKQKKPVPMMTKLKKQILGTSSSSSVIPEKFESDDKVLDAIHAFCEPLVENIFDSKIKDLFERIDAAGVKEVCARSKIQNLFASINDDNKEHIYVKKNEISRISTHISMTWSWLQGCLNDKVSQEYDNDHPKATKKSKETKKYKSKKQKYMNAIEYYSLAKIFDCKIDDSAVINQETFIDWFTSQIGDVTSNYREFSKKFPKDSVSDWENKKQLPGDSKKIGCIHDLLKALKDFQHTFGIFNVVCDGRDTDFYNEYDTINETFQELTRLYDKTRNYLTQKPYSLDKIKLTFGQDTLLNGWTDSKTEKSDNGTQYGGYLFRKKNSIGEYDYYLGISTNPNLFREEEKGGEWERLDYYQLKSETFYGNSYKGTYFDFLDAMNEVLDHFAKNNNITWDKEKTPKDKFKTIRKGKELFDKLVNQKNFKQANQSFIDAFSSNCDYFSEISLSNPSKQYAKDKDKMDKVLDAFAKKNHITWDKEKTPKDKFETIQKGKELFDKLVNQEDFIKANQSFIDAFSPKCDYFSEISLSNPSEQYDEDKDKMDEVLDAFAEKNNITWNAKDMLPTAKFEWIRKEKGDLLVTLDDFDGFKEANKALLQHIEKTWESLEAKLPVAEKYTKKYKNGEYPYFTDFMNDMPKGLLGCAFRPIPISEQSIKTEQEKTDKPLLLFKITNKDLEYAEKSKKDYRKHRGIENLHTMYFRELMSCDEGSCFALGAGTVFYRKASLKKEKPTHEAESPIKCKRSDKESKFPYPLYKDRRFMENQFQLHLSVTANCKPEEITNDNKKVVTDKVRAALRDTENPIQDENLRIIGIDRGERNLLYVCEINGKGEIVKQFSLNIVADDEKPEIKTDYQGLLTKREQERNENRKSWQPLENIANLKKGYLSQAVHQICKLAVDENAFIAMEDLDSNFRQKRVHVEKNVYQQFEKALIEKLNFLVFKDKEPDEPGGLRNAYQLTDQFTSFQDLPKQSGILFYVSPWYTSAIDPWTGFISRFHIEYYNLEKSKEFLDQFTDIHYDREKDAFAFTFDYKNFDKYLNKFQDWEKRTGWTVYSCGQRIKKEKKKEGKGYEYQEVYPTELFKTAFENDKVNIKYDDGHDLRDDITQINDSQFYKDILTALKLTFQMRNSNPETGKDYILSPVFDKKHFDEKHSGFFDSRDFFDQYDKEKKYAEMPIDADANGAYHIAQKCLLAIQRIKDSEKPNLYISAEEWLNARQGRNGQSTDNQTGGEEKSKNQS

SEQ ID NO: 1545 - protein, 1518 aa, unidentified
  REGION 1..1518: note = Cas Enzyme sequence
MDMKENIGQTQRAYTLRLRGGDPKDQAWRDALWHTHAAVNRGAKVFGDWLLTLRGGLDHKLADKDRKSEKSNQDDTHRPQKNRRILLALSWLSVESKLGAPQKYIVAEGHEETEMRKNNVIAALENILKKRGLPEGDIDEWKRDCGPSLSANIRSDAVWVNRSLAFDDAVQNVGNSLTRDEVWDMLEGFLGNSSTYLAPKKSSDEEVSDEDSDSKAKDLVQKAGQWLSSRFGTGKGADFKRLAEVYQKIAEWAETTTPNMTGSAAIESLAATLREFSPPSNDLQSVLKLISGPGYKSATRNLLNQINRKPSIDQEDLTKLKKTAEENRKESESKIGSKGRRPYADAILREVESECGFTYLQDEGPARHVEFAVMLDHAARRVSLAHTWVKLAEAERCKLENDAIKIEQIPEKVKAWLDRFCEERSDESGALEVYRIRPRAVDGWREVVDVWSKPDCKTEEDRIAAARMLQDNPNIQKFGDIQLFEALAAEDALCIWHRDGDLEKEPDHKLLLDYVDARDAEFKKQQFKVPAYRHPDPLLHPVFCDFGESRWKIDFSVHRAVSDLENTKKKVAQIEKQVEKEKKSLQKVSESARTAAQERLSLLEQELKKAKEELDCLTAKNRMTMTLWNGKMMQQTHLCWQSKRLAKDIGLKKNGEGQDSMEVTRADRLGRAAAKAAPHAPVKIAGLFEQNEWNGRLQAPRTQLNHIARYVEKNGWDQKAEKMRNAIKWTVTFSARLRPMGPWCEFARNAGLIPDPKSHPHSGMNKERKGLARLILCRLPGLRILSVDLGHRYAAACAVWESMSALSLKHDCRAVGCDGPTENDLFLHLKKRVKKQRKNSEVEVTETTIYRRIGPDMLPDGKPHPAPWAKLERQFIIRLQGEEEGVREASNEEIWAVHQMETLLGKPNPLIDRLVASGWGNTKKQQARLDALRDLGWKPVEKAAIQPDALAEEEEGTFRPSLAVDELMFAAVRTMRLALRRHGDRARIAHNLITDFQTMPGGRKCALNENERIELLKDTLQDWYGLFSSRVWKDSEAEQLWQNYIRDLAEYKAPENLVQNTTGMDHGKKKKLDREKFRDLACLLARDPDLRKKLHDAWKTRWEKDDVRWRELLRWFRNWIRPRGNFGDNPAIRGVGGLSLTRIATITEFRRKVQVGYFTRLRPDGSRNEISESFGQGMLDALEHLREQRVKQLASRVIEAALGVGRMKRMQKSRDPRRPVAPVDKPCHAVVIEDLTHYRPEETRTRRENRQLMNWASARVRKYLQEGCLLYGLLLREVNAAYTSRQDSRTGAPGIRCQDVPVVEFMCSPFWRKLVDRTAKKLPADEENADMRFLSAVKKRWDGRTLSELRKAGVVRIPLKGGEVFISADPQSPAAHGIQADLNAAANIGLRALMDPDWPGKWWYVPCDPKTCKPAKENVQGSAVVNVDQPLCLSAVITELNRNGQKSKGKSEGKTKNIINLWRDISSSSLDSAEAGAWQDYKNYWQHVRVRVLHILEEQLKRRDPLWPGHSEEEDLPF

SEQ ID NO: 1546 - protein, 1519 aa, unidentified
  REGION 1..1519: note = Cas Enzyme sequence
MDLTQRAYTLRLEGVDPSDDSWREALWQTHEAVNIGAKVFGDWLLTFRGGLDHTLADKKVKGRGGKDVRVSSDEERRMRRIFLALSWLSVESRLGAPDKFIVATGEEDEETRNNKVIKAFEEILKKRGLSKKEIEEWKEDCKISLNSAIRKDAVWVNRSKAFDEACRDLKGALNRKEVWDFLGFFFLSPNAYLASEKSVDEEIIDSEQVDEEKDFVEKAGQWLSSRFGKGKGADFQRMAKIYKEIGSWANTARPGIGGKRAIEEMARRLSRKGFGPGLRNLNDILDLISGPGYKSATRNLLKKLSEKGTINRQDLYNLKTKAEMDAQKCEEKIGKKGHRKYADFILDKVERSSGITYFADKNGFNIPISDRNKFGTKILLGASRHREFAVMLDHAARRVCSTHTWIKRAEANRRKYEDDANKMKSIPSTIKEWLCDFCENRSAALGASVPYRIRRRAVEGWKEVVDAWSKDGCNTTEDRIASARRLQGELENFGDIQLFEALADEDASCVWHVDGDPKKAPSHQLLLDYVAAEEASFNMQRHKVPAYRHPDPLFHPVFCDFGNSRWSIKYSVHEAKKTRKDPWKEVDKRRREVEKAKNAAQRCSNDGEKKIKAEEKLRLAEMLLHEAERELEFLASPKRVCMKLWNGINLQEVQMLWRSKRLDKDLAIRCGNRGPHAIQVSRADRLGRAAVNASKSDSLQIAGPFEQRCWNGRLQAPREQLARIGRRVERHGWDKKSQMMKRDIKWLLTFSPKLRPLGPWLEYGGKEKIKERQEVEEKGGRGNDARLLLCRLPRLRVLSVDLGHRYAAACAVWETLGEEDFKREIKGRKVLCGGSSGECMYCHTLHRDREGKVLKTIYRRIGADTLPDGRPHPAPWARLDRQFLIKLQGEREGAREASVEEIWKVHELEARLGRTKPLIDRLVAAGWGQTPGQKKRLRILEGLGWKQTQGVVDVTKDNEMSYKPSLSVDELMFSTVRTLCLALGRHGDRARIAHALTADYKKMPGGQRYYFNRAEDASVGDDESVRHEKHVEYILDALLRWHDLFEAKGWQDEEARELWDKYIANLSCCLEVSEMDDSLTDAELKKRRKDFKERLRPVAEAIVKDGKLRKKIQQEWKRRWERDDEKWREDIRWFKHWIFPRKKQAGPSIYRMGGLSLTRLATMTEFRRKVQVGFFTRLHPDGTTGEIGEDFGRKVLEDLEVMREQRVKQLVSRLVEAALGIGSEDLSHWEGQKRPQQRIEDPRFSPCHAIIIEDLTHYRPDETRTRRENRQLMTWSSSKVKKYLAEACELHGLYLLEVPARYTSRQDSRTGAPGIRCSDVSVAEFKNSPYWRKEVARAKAKNEKNQGDARDRYLCELDAQLAGSGRLKNVRVPIAGGEIFVSADTGSPATKGIQADLNAAANIGLRALVDPDWPGKWWYVPCDSSSFKPINDRVKGCKVIDTQESLKEASPGLAVKGEKNSEKKRQRRAKHREVVNLWRDISAKPVSAAYGPWDEYSVYWNRVQDQVVKILRNNLALSK

SEQ ID NO: 1547 - protein, 1519 aa, unidentified
  REGION 1..1519: note = Cas Enzyme sequence
MPQQDNPPVTQRAYTLRLRGADPSDISWRNALWQTHEAVNKGAKAFGDWLLTLRGGLDHTLADAKVKGGKGNPDRDPTDEERKVRRILLALSWLSVESKLGAPQNYIIASGTEAAEDRNGKVVAALEEILKSRNLAENEIDKWKKDCSASLSAAIRDDAVWVNRSRAFDDAVESVGCSLTREEVWDMLERFFGSRAAYLAPAKVTEDESSEEEQEEKAKDLVQKAGQWLSSRFGTGKGADFFRMAAVYGKIAAWAVNAQAGTTGNQAINKLAADLSEFTPASNDLKGVLGLISGPGYKSATRNLLTQIDDKPIVTQEDLKKLNKTAAADRGKCETNTGSKGQRAYSDAILKDVESVCGFTYRVDENGNAVSVSNYSLYGDDYNWGSARHSEFAVILDHAARRVSLAHTWIKRAEAERRRFEDDAQRMANVPGPVKAWLDSFCSERSATSGALEPYRIRRRAVDGWKEVVTAWSKSSCSTSADRIAAARALQDDPEIDKFGDIQLFEALAEDDAVCVWHKEGDAAKAPDPQPLIDYALAAEAEFKKRHFKVPAYRHPDALLHPIFCDFGKSRWDICFDVHKNAQTPFPRALCLTLWTGSGMEPVPLCWQSKRLACDLALGNNPRNAGASAVTRADRLGRAASNVTKNDQVKISGLFEQEDWNGRLQAPRQQLEEIARYVEKHGWDQKAKKMRDGIQWLVTFSAKLQPQGPWLDYAKTNVLKLDQKNGDIVVAPSNSKNEWRGLAYPFWHSDNQDGRKGLAKHCLSRLPGLRVLSVDLGHRYAAACAVWEAVEKGDFEKECSKAKEKGAEIHYGPDRYKPEVAIYAHLVWPEKASNSATKKAKTEGRDKFHPVTIYRRIGADTLPDGPPHPAPWARLDRQFLIKLQGEEEEVREASNEEIWKVHQLESELGRRVPLIDRLVNAGWGWSDKQKARLEALCAWGWKRASEAGFSGGTDADEGEVRRPSLSVDELMSSAVRTMRLALKRHGDRARIAHYLITDEKTKPGGVKEKLDENGRVELLQDALIMWHDLFSSRGWRDDAAGQLWNDYVAKLSGYNAPEETDEESSGPERRKKQKENREKLYDAAKALAQDVTLRKALHDAWKKRWKDDDERWKKQLRWFKDWVLPRGKHASDPAIRKVGGLSLPRLATLTEFRRKVQVGFFTRLQPDGTRAETKEQFGQSALDALEHLREQRVKQLASRIAEAALGIGRMRRPMEGKDPKRPDVRVDAPCHAIVIEDLTHYRPEETRTRRENRQLMTWSSSKVKKYLAEACQLHGLHLREVSASYTSRQDSRTGAPGIRCQDVPVDEFMRSPFWRKQVKQAEAKQAENKGDARDRFLCNLNAMWKDKTVADWEKAGVIRIPLNGGEIFVSADCTSPAAKGLQADLNAAANIGLRALTDPDWPGKWWYVPCDPASFKPIKDKVEGSKAVNPDKPLPHSTQKQDGNAAKDTKKRGNKGAGKSKEVVNLWCDISSFPLQDKSREWKEYAAYQNEVQCRILEEQIKGRDKQPHEGSKEDDISF

SEQ ID NO: 1548 - protein, 1519 aa, unidentified
  REGION 1..1519: note = Cas Enzyme sequence
MDLTQRAYTLRLEGVDPSDDSWREALWQTHEAVNIGAKVFGDWLLTFRGGLDHTLADKKVKGRGGKDVRVSSDEERRMRRIFLALSWLSVESRLGAPDKFIVATGEEDEETRNNKVIKAFEEILKKRGLSKKEIEEWKEDCKISLNSAIRKDAVWVNRSKAFDEACRDLKGALNRKEVWDFLGFFFLSPNAYLASEKSVDEEIIDSEQVDEEKDFVEKAGQWLSSRFGKGKGADFQRMAKIYKEIGSWANTARPGIGGKRAIEEMARRLSRKGFGPGLRNLNDILDLISGPGYKSATRNLLKKLSEKGTINRQDLYNLKTKAEMDAQKCEEKIGKKGHRKYADFILDKVERSSGITYFADKNGFNIPISDRNKFGTKILLGASRHREFAVMLDHAARRVCSTHTWIKRAEANRRKYEDDANKMKSIPSTIKEWLCDFCENRSAALGASVPYRIRRRAVEGWKEVVDAWSKDGCNATEDRIASARRLQGELENFGDIQLFEALADEDASCVWHVDGDPKKAPSHQLLLDYVAAEEASFNMQRHKVPAYRHPDPLFHPVFCDFGNSRWSIKYSVHEAKKTRKDPWKEVDKRRREVEKAKNAAQRCSNDGEKKIKAEEKLRLAEMLLHEAERELEFLASPKRVCMKLWNGINLQEVQMLWRSKRLDKDLAIRCGNRGPHAIQVSRADRLGRAAVNASKSDSLQIAGPFEQRCWNGRLQAPREQLARIGRRVERHGWDKKSQMMKRDIKWLLTFSPKLRPLGPWLEYGGKEKIKERQEVEEKGGRGNDARLLLCRLPRLRVLSVDLGHRYAAACAVWETLGEEDFKREIKGRKVLCGGSSGECMYCHTLHRDREGKVLKTIYRRIGADTLPDGRPHPAPWARLDRQFLIKLQGEREGAREASVEEIWKVHELEARLGRTKPLIDRLVAAGWGQTPGQKKRLRILEGLGWKQTQGVVDVTKDNEMSYKPSLSVDELMFSTVRTLCLALGRHGDRARIAHALTADYKKMPGGQRYYFNRAEDASVGDDESVRHEKHVEYILDALLRWHDLFEAKGWQDEEARELWDKYIANLSCCLEVSEMDDSLTDAELKKRRKDFKERLRPVAEAIVKDGKLRKKIQQEWKRRWERDDEKWREDIRWFKHWIFPRKKQAGPSIYRMGGLSLTRLATMTEFRRKVQVGFFTRLHPDGTTGEIGEDFGRKVLEDLEVMREQRVKQLVSRLVEAALGIGSEDLSHWEGQKRPQQRIEDPRFSPCHAIIIEDLTHYRPDETRTRRENRQLMTWSSSKVKKYLAEACELHGLYLLEVPARYTSRQDSRTGAPGIRCSDVSVAEFKNSPYWRKEVARAKAKNEKNQGDARDRYLCELDAQLAGSGRLKNVRVPIAGGEIFVSADTGSPATKGIQADLNAAANIGLRALVDPDWPGKWWYVPCDSSSFKPINDRVKGCKVIDTQESLKEASPGLAVKGEKNSEKKRQRRAKHREVVNLWRDISAKPVSAAYGPWDEYSVYWNRVQDQVVKILRNNLALSK

SEQ ID NO: 1549 - protein, 1520 aa, unidentified
  REGION 1..1520: note = Cas Enzyme sequence
MAYQNGKEQPTVTNQRAYTLRLSGTNDQDSIWRNRLWHTHEAVNKGAKTFGDWLLTMRGGLCHTLAEADVPGKGNKPARHPTPQEIRSRRVVLALSWLSVESQHGAPERHLVSHDLDIATGERKNWKTVEALREILHGRCLCKELIDEWANDCRDSLSATIREDAVWVNRSKAFDLAAKKIGASLTREELWDFLQPFFANKHGYLQMDTVAGVTNGDSETDAEEAKEDSSEEKAKDLSQKAGQWLSSRFGTGTGADFSRFSKVYEVLAARCGSVAVGVSGVEAIRILAGTLADFSPGSNDIEGMLGLMSGPGYKSATRNILQKINTLQTVSQQDLDRLREASEKDALQSKQKVGGKGSRPYANAILQDVEAACGICYAGTGESPARHWQYAVILDHAARRVSMAHSWIKRAEEQRSKFEIEKDKLDHVPKDALAWLDAFCARRSSESGASDAYRIRRSAVDGWKQVVAAWAALPPKPENQGSELLSDAESARIQAARELQDTVEKFGDIQLFEALSLTGAKCVWQPDGRPDAQPLLDYVAGTDAISKKQRFKVPAYRHPDALLHPVFCDFGNSRWNINYAIHRAPEKLTPAQQLLEKKKAEIDKAELTLAKAGDAAKQANISEKINGLRAAFIQQQEKVAWLNSRHAMTMSLWDGTHIEDTPLIWQSKRFGSDIGQPVEAQPLPVSRADRFGRAVALAQDNVPVIPSGLFDLSDWNGRLQAPRRQLEAIAAIRDSAKLSVNEKQQLVAKRIQSIRWLLTFSAKLQSHGPFIAYAAQHGFDWRYGAHGPENKSRQGLAKLILCRLPGLRILSVDLGHRYAAACAVWETLNAGQIQKACLDAGKEAPGPCTLYLHLKQIANGKEKKTIFRRIAADTLPDGSPHPAPWARLDRQFLIKLQGEDRDARLATSEEIAAVEQMENELGVVRQLKRKGRELLVDELMSDALRTLRLGLRRHGVRARIAFNLTANKRIRPGGKEEVLDQEGRVLLLTETLLAWYELYTAERWTDEPARELWNRHIQPLLGATILQNTVNQEDTPSAAKRRKLREETSGKLKHVAEEIAKNDSLCRQLHVLWSAQWQTEDVIWRTRLRMMRRWLLPRGVKRNAQLRISIRDVGGLSLTRIASFKSLYQVQKAYQMRPHPEDPRLNIPERGDSRLENFGQRVLDAMERMRENRVKQLASRIAEAALGIGGETGISSKDGSQKKRPTERSSDPRFAPCHAVVIEDLTHYRPDETQTRRENRQLMSWSSSKVKKYLGEACELNGLYLREVSPAYTSRQDSRTGAPGLRCNDVTVVEFNNSPFWRKQVGAAEKNQKEGNKGDARERYLLSIEEGIRGAANDRDIFRIPVKGGEIFVSACITDGGNNAKKNAPPGLQADLNAAANIGLRAIFDPDWEGRWWYIPCDAATLCPDAKKFIGCKAVDPTKPLRVVAEEGAISASGIGSKKSGRKKNAATDGTRIVNLWRDPSGAPIHRDVLRSPEWQDYAGYWNEVQHRVIRNLKTCYEQTSQQEDPFVSQDADKPF

SEQ ID NO: 1550 - protein, 1521 aa, unidentified
  REGION 1..1521: note = Cas Enzyme sequence
MRHSCDLGMAVRGQEEMATENGKEQPSVTTQRAYTLRLCGLDKHDNTWRDRLWNTHEAVNKGAKAFGDWLLTMRGGLCHTLAEVDIPGIGKKLARNPTQQEIKNRRIVLALSWLSVESIHGAPESHLVSHDLDTVTGERKNWKTVDALHEILRCRHLCEEEINQWVVDCRDSLSAKIREDAVWVNRSKAFDLAKERKGASLSREDIWDFLQPFFGNNNSYLKMKTAVTNTSENSEADSEESKDEPSEEKAKDLSQKAGQWLSSRFGTGTGADFCRFYEVYDAMAKHCQNIQAGMSGAAVCGSLADALHGFSPSSRSINGILELISGPGYKSATRNVLQQINNMQSVSQLDIDRVRDASEKDAQQSREKVGGKGSRPYANAVLQDVEAASGITYHNACNGPSHHWQYAVILDHAARRVSMAHSWIKRAEEERSKFEIEKDKLQCVPSDARAWLDAYCARRSSESGAIDAYRIRRSAVDGWKQVVAEWAALLAKAKNAGSELPSEAESARIQAARELQDTIEKFGDIQLFEALSLPDAKCVWLTNGKPDAQPLMDYVAGTDAVSKKQRFKVPAYRHPDAFLHPVFCDFGNSRWSIDYAVHRAPEKLARAQQLLEKKKEELTRAEQALSKASDPSKRSSIEKKLKTLNVAFKQQEAEVLWLESHHAMTMGLWNGSRIEDTPLLWQSKRFGSDIGQAGAEHPLVASRADRFGRAVAMAKDNAPVVPSGLFDLADWNGRLQAPRRQLDAIAAIHDRTDLSVEEKRQLVAKRIRTIRWLVTFSAKLQSRGPFIAYAAQHGFDWRYGAHGIENKSREGLAKLVLCRLPGLRILSVDLGHRYAAACAVWETLSAAQMQNACLEAGMEAPSQRTLYLHLKHFVNGKEKKTIYRRIGAETLPDGSPHPASWARLDRQFLIKLQGEDRDARQATCDEVVAVEQLETELGYVRPIKRKGREHLVDELMSDALRTLRLGLQRHGARARIAFNLTATKRTRPGGIQELLDQESRIGLLTETLLEWNELYAGERWADELARDMWNKHIQPLLGGTILQETNNQDVTPSAAKRRMQREETREKLRPVAKQIAENDSLCRQLNVLWSTRWQIEDAAWRMRLRWMRRWLLPRGINRDPQFRKSIRDVGGLSLIRIASFKSLYQVQKAYWMRPHPDDLRRNIPERGDSSLTSFGQRVLDAMERMRENRVKQLASRIAEAALGIGDETSVNAKNGRRKRPTERSNDPRFAPCHAVVIEDLTHYRPDETQTRRENRQLMSWSSSKVKKYLGEACQLNGLYLREVPPAYTSRQDSRTGAPGLRCNDVAVPEFNSSRFWRKQVEAAEKNQKDGKKGDARERYLLSIDERIRSEANDRDVFRIPVKGGEIFVSACGQDGGSNANRKAPPGLQADLNAAANIGLRAIFDPDWEGRWWYIPCDATTICPVEKKFNGCKAVDSSKPLRIVAEKVAVSSSSINEKRSGRKGIALTDGSRIVNLWRDPSGAPIRRDVPSNSEWQDYAEYWNKVQSRVIANLRKSYGLREI

SEQ ID NO: 1551 - protein, 1521 aa, unidentified
  REGION 1..1521: note = Cas Enzyme sequence
MRHSCDLGMAVRGQEEMATENGKEQPSVTTQRAYTLRLCGLDKHDNTWRDRLWNTHEAVNKGAKAFGDWLLTMRGGLCHTLAEVDIPGIGKKLARNPTQQEIKNRRIVLALSWLSVESIHGAPESHLVSHDLDTVTGERKNWKTVDALHEILRCRHLCEEEINQWVVDCRDSLSAKIREDAVWVNRSKAFDLAKERKGASLSREDIWDFLQPFFGNNNSYLKMKTAVTNTSENSEADSEESKDEPSEEKAKDLSQKAGQWLSSRFGTGTGADFCRFYEVYDAMAKHCQNIQAGMSGAAVCGSLADALHGFSPSSRSINGILELISGPGYKSATRNVLQQINNMQSVSQLDIDRVRDASEKDAQQSREKVGGKGSRPYANAVLQDVEAASGITYHNACNGPSHHWQYAVILDHAARRVSMAHSWIKRAEEERSKFEIEKDKLKCVPSDARAWLDAYCARRSSESGAIDAYRIRRSAVDGWKQVVAEWAALLAKAKNAGSELPSEAESARIQAARELQDTIEKFGDIQLFEALSLPDAKCVWLTNGKPDAQPLMDYVAGTDAVSKKQRFKVPAYRHPDAFLHPVFCDFGNSRWSIDYAVHRAPEKLARAQQLLEKKKEELTRAEQALSKASDPSKRSSIEKKLKTLNVAFKQQEAEVLWLESHHAMTMGLWNGSRIEDTPLLWQSKRFGSDIGQAGAEHPLVASRADRFGRAVAMAKDNAPVVPSGLFDLADWNGRLQAPRRQLDAIAAIHDRTDLSVEEKRQLVAKRIRTIRWLVTFSAKLQSRGPFIAYAAQHGFDWRYGAHGIENKSREGLAKLVLCRLPGLRILSVDLGHRYAAACAVWETLSAAQMQNACLEAGMEAPSQRTLYLHLKHFVNGKEKKTIYRRIGAETLPDGSPHPASWARLDRQFLIKLQGEDRDARQATCDEVVAVEQLETELGYVRPIKRKGREHLVDELMSDALRTLRLGLQRHGARARIAFNLTATKRTRPGGIQELLDQESRIGLLTETLLEWNELYAGERWADELARDMWNKHIQPLLGGTILQETNNQDVTPSAAKRRMQREETREKLRPVAKQIAENDSLCRQLNVLWSTRWQIEDAAWRMRLRWMRRWLLPRGINRDPQFRKSIRDVGGLSLIRIASFKSLYQVQKAYWMRPHPDDLRRNIPERGDSSLTSFGQRVLDAMERMRENRVKQLASRIAEAALGIGDETSVNAKNGRQKRPTERSNDPRFAPCHAVVIEDLTHYRPDETQTRRENRQLMSWSSSKVKKYLGEACQLNGLYLREVPPAYTSRQDSRTGAPGLRCNDVAVPEFNSSRFWRKQVEAAEKNQKDGKKGDARERYLLSIDERIRSEANDRDVFRIPVKGGEIFVSACGQDGGSNANRKAPPGLQADLNAAANIGLRAIFDPDWEGRWWYIPCDATTICPVEKKFNGCKAVDSSKPLRIVAEKVAVSSSSINEKRSGRKGIALTDGSRIVNLWRDPSGAPIRRDVPSNSEWQDYAEYWNKVQSRVIANLRKSYGLREI

SEQ ID NO: 1552 - protein, 1522 aa, unidentified
  REGION 1..1522: note = Cas Enzyme sequence
MAEKNSKEQPVVTTQRAYTLRLSGTDKHDNSWCDRLWKTHEAVNKGAKVFGDWLLTMRGGLCHTLAEADVPGKGKKPARRPTQQEIKNRRIVLALSWLSVESKCGAPESYIVPHDSNTATGERKNWKTVEALREILRSRGLTEERAIEWADDCRDSLRATIREDAVWVNRSKAFDLAATNIGASLTREELWDFLQPFFANRHSYLEMDTVASATNGDSETDTEESKAASSDEKAKDLSQKAGQWLSSRFGTGPGADFSRFSKVYEVLATACRSIAPEVSGVEAINRLAIAIKKCSPSSNDIEGILGLISGPGYKSATRNILQQINRLQSVSEQDLSRLCDACEKDASQSRQKVGGKGSRPYADAILQDVERTCGICYARTEDHPSRHWQYAVILDHAARRVSMAHSWIKRAEEQRSKFEIEKNKLLRVPRDALAWLAAFCAKRSSDSGANDAYRIRRSAVDGWKQVVAAWAALPAKSEIAGSELRSDAERARIQVARELQDTVEKFGDIQLFEALAIREAKCVWMPDGKPDAQPLLDYVFGTDAIAKKQRFKVPAYRHPDAFLHPVFCDFGNSRWSIDYAVHRAPGKLTKARQLLEKKSAEISKAELALGKMDDALRHAAISETLQNLRAAYKQQQAEVAWLKTLQAITMGLWDGNGIQDTQLLWRSKRFGANIGQPDAVHPSPVSRADRFGRAVALAEDNVPVIPSGLFDLPEWNGRLQAPRRQLEAIAAMRDSAKLSAGEKQQLVAKRIHSIRWLVTFSAKLQSHGPFITYAEQHGFDWRYGMHGFENKSRQGLAKLILCRLPGLRILSVDLGHRYAAACAVWETLSTGQIQKSCGVAGMEAPGPRTLYLHLKQIVDGKEKKTIYRRIGADTLPDGSPHPAPWARLDRQFLIKLQGEDRDARPATSEEIAAVEHMENELGVVRQLKRKGRELLVDELMSDTLRTLRLGLRRHGERARIAFNLTAAKRIRPGGIQDVLDQEGRISLLKETLLLWYELYSGERWRDKPAEDLWNRHLQPLLGGAILPDTVDQEGNASAAKRRKQREETSENLRPVAEQIAKNDSLCRQLHVLWGAQWQTEDAVWRTRLRWMRRWLLPRGIKRDAQLRKSIRDVGGLSLTRIASFRSLYQVQKAYRMRFHPEDPERNIPKRGDSRLEGFGQRVLDAMERMRENRVKQLASRIAEAALGIGDEAGINSKDGRQKKRPTERSRDSRFVSCHAVVIEDLTHYRPDETRTRRENRQLMSWSSSKVKKYLSEACQLHGLHLREVSPAYTSRQDSRTGAPGLRCKDVTVAEFMKSPFWRKQVNTARENRGKENNGNARDRYLLWIDEKISADVTKETDSFLIPSDGGEMFVSAFEDNKAQPASRRKKPSALQADLNAAANIGLRALLDPDWEGRWWYIPCDAATLCPDAKKFIGCKAVDPSKPLRVVAEEGAMSASGIGSKKSGRKRNVATDETRIVNLWRDPSSMPVHLDASGSGEWQGYHEYKDNVQSRVIRNLKARYKQTWRQEYPFVPQDEDTPF

SEQ ID NO: 1553 - protein, 1522 aa, unidentified
  REGION 1..1522: note = Cas Enzyme sequence
MAEKNSKEQPVVTTQRAYTLRLSGTDKHDNSWCDRLWKTHEAVNKGAKVFGDWLLTMRGGLCHTLAEADVPGKGKKPARRPTQQEIKNRRIVLALSWLSVESKCGAPESYIVPHDSNTATGERKNWKTVEALREILRSRGLTEERAIEWADDCRDSLRATIREDAVWVNRSKAFDLAATNIGASLTREELWDFLQPFFANRHSYLEMDTVASATNGDSETDTEESKAASSDEKAKDLSQKAGQWLSSRFGTGPGADFSRFSKVYEVLATACRSIAPEVSGVEAINRLAIAIKKCSPSSNDIEGILGLISGPGYKSATRNILQQINRLQSVSEQDLSRLCDACEKDASQSRQKVGGKGSRPYADAILQDVERTCGICYARTEDHPSRHWQYAVILDHAARRVSMAHSWIKRAEEQRSKFEIEKNKLLRVPRDALAWLAAFCAKRSSDSGANDAYRIRRSAVDGWKQVVAAWAALPAKSEIAGSELRSDAERARIQVARELQDTVEKFGDIQLFEALAIREAKCVWMPDGKPDAQPLLDYVFGTDAIAKKQRFKVPAYRHPDAFLHPVFCDFGNSRWSIDYAVHRAPGKLTKARQLLEKKSAEISKAELALGKMDDALRHAAISETLQNLRAAYKQQQAEVAWLKTLQAITMGLWDGNGIQDTQLLWRSKRFGANIGQPDAVHPSPVSRADRFGRAVALAEDNVPVIPSGLFDLPEWNGRLQAPRRQLEAIAAMRDSAKLSAGEKQQLVAKRIHSIRWLVTFSAKLQSHGPFITYAEQHGFDWRYGMHGFENKSRQGLAKLILCRLPGLRILSVDLGHRYAAACAVWETLSTGQIQKSCGVAGMEAPGPRTLYLHLKQIVDGKEKKTIYRRIGADTLPDGSPHPAPWARLDRQFLIKLQGEDRDARPATSEEIAAVEHMENELGVVRQLKRKGRELLVDELMSDTLRTLRLGLRRHGERARIAFNLTAAKRIRPGGIQDVLDQEGRISLLKETLLLWYELYSGERWRDKPAEDLWNRHLQPLLGGAILPDTVDQEGNASAAKRRKQREETSENLRPVAEQIAKNDSLCRQLHVLWSAQWQTEDAVWRTRLRWMRRWLLPRGIKRDAQLRKSIRDVGGLSLTRIASFRSLYQVQKAYRMRFHPEDPERNIPKRGDSRLEGFGQRVLDAMERMRENRVKQLASRIAEAALGIGDEAGINSKDGRQKKRPTERSRDSRFVSCHAVVIEDLTHYRPDETRTRRENRQLMSWSSSKVKKYLSEACQLHGLHLREVSPAYTSRQDSRTGAPGLRCKDVTVAEFMKSPFWRKQVNTARENRGKENNGNARDRYLLWIDEKISADVTKETDSFLIPSDGGEMFVSAFEDNKAQPASRRKKPSALQADLNAAANIGLRALLDPDWEGRWWYIPCDAATLCPDAKKFIGCKAVDPSKPLRVVAEEGAMSASGIGSKKSGRKRNVATDETRIVNLWRDPSSMPVHLDASGSGEWQGYHEYKDNVQSRVIRNLKARYKQTWRQEYPFVPQDEDTPF

SEQ ID NO: 1554 - protein, 1523 aa, unidentified
  REGION 1..1523: note = Cas Enzyme sequence
MTKLNPGVSNAVAENQAVVESATTQRAYTLRLCGTDANDNSWREALWSTHEAVNNGAKTFGDWLLTLRGGMCHTLARSDQGRRTLLALSWLSVESAPKKGDRYEIFVVACGEKDSQSSRNEKVLKRLREILVKRGVSGTELDSWVSDCAPSLSSAIRDDAVWIDRSEAFDQAVVQIGGSLTRDVAWDFLDPFFGNADTYLSSLSIEDDDESESKGKEEKAKDLGQKAGQWLSSRFGTGKGADFDRIALVYKDISEWSKNSPTFVSGVDAINSLVHFLIGHKPFPNDAVGILKLISGPGIKPTTVNKTIQLIGSQLGRPVTPEILKKLHESSVIQADHSKNKTGGKGRRPYSNVIISEVEAACGFTYLQSDGPSRHAEFAVMLDHAARRVSIAHTWIKRAEAERQTFKADAQKMSDVPAAAKIWLDIFCKERTLATNALEPYRIRKRALGGWKEVVTRWNRADCETVQNRIDAAREIQDDPDIEKFGDIQLFEAIAADQTLCVWKPDGNASTQPLTDYSLATDAVAKQQRFKVPAYRHPDSLLHPIFCDFGNSRWEIKFAVHEAATKLEAARKRLLKKEADFIAVTKRLVKANTPEKTAIVQADIEDIGKEITQASDDVKWLSTPHGITLGLWNGVTVHRVPKMSWSSKRLAKDLALRQMGARGSLIVATRADRLGRAAAGANKDDLISVLNVFDQANWNGRLQAPRAQFAAIAKHVSKHGWDSKARTMRDRIRWLVTFSAALQSTGPCIDYLSQFDEHSPAKPFVIKKSKKPEEVGTIAIKHADNDKRGTKLILSRLPGLRILSVDLGHRYAAACAVWEAISSEQMVNESKKLNHRAPTSTDLYLHLKCNADPKKSRTTIYRRIGADTIKDSATGKVTTHPAPWARLERQFLIKLPGEQQQPRAASSKDAHGVNELQLVETLAKQIGQVVEDDANKKDRSVHELMARAVRLVALGLKRHARRAKIAYAFDPATKVILGMGASEKEFTEGDSAHICLFADALIEWHSLATDAKWNDKRARNLWNQHVSTIAGGWTIEDPKATDEVRTTSKQRTQSEDSLRLKMAPIAQQLLKINRSAIHNAWKDRWESDNGRAAKIDKATGQKTFDGTGFHASLRWVTDWIMGKNLIGATGDGWKQNVGGLSVTRITTMKALYQLHKAFAMRATPLKPRGAPEKGESNIGIAQSILIAMERMRDQRVKQIASRIAGSALGLGGQWVMRDIPANEKKKRSARTKLVWLEDLSPKYSPCHAVVIENLKNYRPDEMRTRRENSQLMSWASSKVEKYLGEACQLNGLHLRSVSAGYTSRQDSRTGAPGIRCCDVSVKDFQQKPWWRKSVEAAKQKNKEGKGSAFDRYLETLDEQHPKSTSTPSGVQLIRIPVSGGDLFVSADHSSPAAKGLQADLNAAANIGLKALLDPDWQGKWWFVPCASVTNTPVTDKVKGSQVISNVALIPIVQGGTKPARSKVGKKERDVVNIWRDPSSLPIKADGNWFGSIEYWNKVRIRVIDVIQTKNNFAKLTSTQDTPW

SEQ ID NO: 1555 - protein, 1526 aa, unidentified
  REGION 1..1526: note = Cas Enzyme sequence
MAMPDQKPAPVTQRAYTLRLRGAAPEDQSWRENLWRTHEAVNKGAEAFGDWLLTLRGSLDHTLADAPVPQGKNKPDRQPTADERRDRRILLALSWLSVESKHGAPSAASGLIVASGGEPQAGRNRKVLAALKDILKSRRLADGDIDAWVKDCEASLSAAIRDDAVWVNRSKAFDMAAKRVGTSLTCGEVWDMLERFVGSPHVYLSPLGGAEDEGAGDGAATETRGEEKAKDLVQKAGQWLSSRFGTGKGADFSAMGRAYEAIGNWAGKASPGMRGAHAVAALAAALSKFNPASNDLQGVLGLVSGPGYKSATRNILSKVSAKQRITRADLDGLKESAEQDAQKCKSNTGAKGRRPYSDAILSGAEGACGFTYLQKNGPARHSEFAVMLDHAARRVSLVHTWIKRAEAERRQFEEDAKKMANVPAQVRAWLDKFCEDRSGASGAVDGYRIRRRAVDGWKEVVAAWAKAACKTENERIIAARALQDDPEIDKFGDIQLFEGLASDEAECVWRLNGKADPQPLLDYVAATDAEAKKRRFKVPAYRHPDPLLHPVFCDFGYSRWKVAFAVHEARRRLIDAEGNVAEAKTLQQKQRAQQKLDKVKQEFQTASGAEGDRIISMGLWTGKGIEDAALRWQSKRLVRDLALHARHQEHGETPKGVSRADRLGRAAADAAQGSAVSIIGLFGQKEWNGRLQAPRPQLEAIARIRDNPKLSATERRNRMAKMMSHLRWLITFSAKLQPQGPWTEFASRNGLKADPKYWPHADENKRRQGLARLVLGRLPCLRVLSVDLGHRYAAACAVWETLSADAFAQECKEARKKGAAIESGPNGAKPDEALYAIIKWPKCKTKKPTKKAITEKRDEFEPHTVYRRVGPDVFTSTGEVNPAPWARLDRQFLVKLQGEDRLARWPTESERTMVADFEKAVGREAPQRRSFQVDELMSAAVQNVRLAIQRHGRRARVAFNLTATKRLLPGSRQEDLTPEGRVGLLADTLADWYALFTGKGWCDEWAKKQWDAHIAPLLGGAALPQVPEDADATPKARKKYRADLTENLKPVADSLAKNDSLCQKLHCLWATRWREDDAAWRKRLRWLRDWILPRGKRGKDHVAICHVGGLSLTRIATIKSLYQVQKAFHMRPEPDDLRKNIPAKGDDALLDFGRSILDAMEHMREQRVKQLASRIAEAALGIGRMKRPEKGKDPKRPRTRVDQSCHAVVIENLTHYRPEETRTRRENRQLMSWSSSKVKKYLSEACQLHGLHLREVQAGYTSRQDSRTGAPGVRCQDVPVADYVRQGGYLWKRVKKALDEVAEKNDEASAENRLLASLYRRWDDKSNVWTDAKGAKWTLGQDGRWSHRNGVALDPKKAVSPAAVRIPQRGGEVFVSADPHSPAAKGLQADLNAAANIGLRALIDPDWPARWWYVPCNSQDFKPHKDKVKGCLVVDSDTPLKAATAEDDPGTGAPRSKKKAKAPSREIVYLWRDVSTRRPVTAKDGPWEATPEYWNKVQARVIGNLRKNWPSFADKEESASHGNTPR

SEQ ID NO: 1556 - protein, 1527 aa, unidentified
  REGION 1..1527: note = Cas Enzyme sequence
MPPVDTTTRAYTLRLINSANSHWRDLLWQTHCTVNRGVYVWGDWLLTLRGGLPASLADDAELLAVSDKDLKENLKKQKLRDGETEADRQQELEHQRRNSLRVVLALSWLSVESPASLVPQEQIVAHGSSFAPADQNKADYKESQNDEVKKRFDKILKHKGIPSKEQTLWREACLPTLTARIRDDAVWVDRSACFERATKRYGKDYAEQWNVDSFFFLLGGVTEYFQMPDDEAAAAADSKDFVQKAGNWLSANWGAGAKSDSGSIATLLETLAAVKNSQVVGKSSQAAFCALLNTVDADPSGKSDSPGLFKQLKQAVGWKGRPSKGAMALEKLLDADTVAEDLWKGVQAKLEEEAKDQRGKGSRSAGPPEWMSRLRKDLEERIAMPYRIQKDLIWEHAVMLDHALRRVSAGHTWIKRAEVSRSVFLHQAASLGRLKEGAPLAIDWLDNYCESRSAESDSRYGYSIRKNAIDGWEDVLKQWNSRSVRTTEDRVEAVRALQDDLEKFGDARLFEDLATDEAKPVWESGPQFLKDYVSAKEAEQNQRRFKVPAYRHPDPLRNPIYTDYGNSRWGISYSALKAVQGAEKRKERLQNIEKKLAQAKTDKARQKLLEQKGELEQPLPLNEVSLDIWNGDVTESLSMKWAGTRLKNDLNFDQFEKGEKTVSRADRFGRGQAGGPGVSITVAEVFQQKDWNGRLQAPRPQLDRLADLVYGKKRNTPTVPDRGEPDYERLHQFSATAKKTRDHLKWFLSFSARLVPHGPMLEFAHLLPKEWTYNHKRMFLNYAGNKTEGRKGRTRIHLARLPAGLRILSFDLGHRYGAACAVWETLTTQQLRQEIATGKALRGGTSDKDLFLHLERVVNGKTRTVIYRRIAPETLPDRTASSATWTRLERQFLIKLQGETRRPFRKDLLKEDGKYRTLPPTRLAFNGEMDGIDRIRGRLGLSALNRDGLKGDKRLIDSLIEATLKEVKQALRRYGDVARVASALQGEEKPKSGGRKIDLTLPENAELRRESTLDALALWKDLAQSPDPKSNPNTDSWISDRYSKWIVEKFGGPDVHAEPPQVSGRSQRHREQEGKRTLFQKVVPKITERDRQKLYQEWSKYWEQQKSQWESALRELRRLILPRPGRKPQHDSELQKEWKRQVKELRHVGGLSYRRLRNIRNFYRLSKAYRMRPEPQDLTVNVPVQGDETLSKYGRRILNQMERLREQRVKQLASRIVEAALGLGSENFPAHGSGRRHLKRPQQPLEDKDPRFAPCHIVVGEDLKNYRPEPSRTRRENRQLADWSARNVRKSILEGCQLNGLHFTEVSPSWTSRQDSRTGAPGYRCQDIAIRELQNPPPYLQKRIQQAQELVSNGKKSPFLYDVIQHLDRLKTTVVRFPNKSGELFVSTATMSQSSSKNKLPPALQADLNAAANIGLKALIDPDWPAAWWSIPVSTVDGTTSPKDFPGSPLLGANPLPLLKRERDADKVKQTKTNAWRDPSVCPLDAESPPWIESNKAYWQIVESRIIRLLSQHLFQGADLEFPEDLS

SEQ ID NO: 1557 - protein, 1528 aa, unidentified
  REGION 1..1528: note = Cas Enzyme sequence
VAKKAEKPGPREAHNPEPQTAQRAYTLRLRGIDPNNTSWRGALWTTHEAVNKGAKFFGDWLLTLRGGLSHELAEPPPVRKGKEGSGEEAVVLRKNRRILLALSWLSVEDDRGAPGHLSRVAKGSDGDAVRQEKLTAALRTILDNRGLTKRDIDSWIVDCTDPLSARIRPDAVWINRSEAFDAAMKEIGSSLTRDEAWDLLGPFFASKEAYLAQVELADDDETPREKAKDLVQKAGQWLSSRFGTGTGADFESMAAVYAAMAKWSDLPRAFRSGDDALADLVECLAPFRPEATNAEGILSLISGPGYKSATRNIIKAWGERPEGVSPDDVNRLGEAAAADDAKCRENIGAKGRRPWSDTILENVQNACGFTYLQESGPSRHSEFAVMLDHAARRVSIAHSWIKRAEAERRRFEVDARRLNAVPADAAARLDQYVKDRTGAAGGEYRIRRRAIEGWDGVVKRWNRIASANDAELEQLAAEVSIERSDGVERSLAERARIGAARLAQADDEDGKFGDIQLFEALAPDDAVCVWRRDEADPQPLKDYVLGHDARFRQRQFKVPAYRHPDPLRHPVFGDFGNSRWKVAYAALEAAKAAHAGRRIGARDAMWVKDPRALRLGLWDGERVRDVDLRWRSKRLSADLALGEDADDAAGRKTSRADRLGRAASGLRSSEAASVAGVFAQDDWSARLQAPRRELDALARRVEKHGWDARAQRMRSRLSWLVTFSAKLECRGPFIEYAARNGIVANRKGEYYPNSDSNKAEKRQGHAKLGLSRLPALRLLSVDLGHRFAAACAVWETITAADMCRECRRYGRAEPGSGELFIHLTRMAEKEVRRGRDKGKVKSIPETTIYRRIGEDFLRDPNTGNVTTTPHPAPWARLDRQFLIKLQGEEKPARMASPAEREYVERLEAGLGRVRGPDEPLPWAVDALMSEAVRTVRLALRRHGDAARIAYAFMPESKRHTPGGGAAEHTAETRTESLLDALVRWNEVRGRGEGAPWRDAGAAAAWASMIQPRLAQALPTIPMEASGQERKRHRAEVQAALGGIAGSFGTAGPAGTQEIFDWWQRKWQSDDGAWGPRLRELRQWLTPRGLARRSSETEEHRARRKARLAGARNVGGLSLTRIATIRELYQVQKAYRYKPEPSNPRAGIALIESDSARGYKFGDRTLQAMERMREQRVKQVASRIAVSALGLGGHWKDIERRDGSGKVLLGDDGNPLFKPVWIEERDAKYPPCHAVVIENLRNYRPEEIQTRRENRALMSWSAGKIRKYLEEACQLHGLHLREVMPNYTSRQCSRTGAPGVRCTDVPVDKATGEPRAFWWGRAVLAAQKKVDGGSEDAESKFLVDLAEHLRALHEAGEEPATVRVPRRGGDLFVAAGTWGMHGSKSIDTAGPGDQSRAAIQADLNAAANIGLRALLDPDFPGRWWYVPCDSATGMPTKDKCAGAACVDLNTALLAPAGESSPRKKRGGKSGEKANAWRDPGCTELAGQGWLPHGAYWRWVQGRVVERLCIANGLSAPTQADTVALPETPW

SEQ ID NO: 1558 - protein, 1528 aa, unidentified
  REGION 1..1528: note = Cas Enzyme sequence
MKKEKQFSPFEKFTNLYSLSKTLRFELKPVGKTLENMRTHLEYDKDLQTFMKDQKIEDAYQTLKPVMDKIHEKFITDSLGSAKAKNIDFSGYLEKYRQKDKKEISDTDEKKLRAEFAQAFQEVAKKIKDEYKNIDSKTGLDVDTEDDETDEDNKKKGKKKGLFKKENQEILTESAILRYIEINIDKLIDNEQEKEKIKDALLEFKRFFTYFGGFNQNRENYYETKDEKATAVATRIVHENLPKFCDNLIQFNCIIKKKKDGTIENIERRSEYLNAYKYLKSAGKITQIKDAESGKMIEADPVAEDIFKISYFSSCLSQSGIEEYNRIIGHYNLLINLYNQAKRGEEKHLEKDKKIFRDLPKFKTLWKQIGCGKKDPLFFSLTHDTKKQAEENKEKHKKPYSVEQILERAKIAGKKYFQGESDDGMINTVSEFKEYILGKEDYEGMYWSKAAMNTISNKYFANYHDLKDRLKVAKVFQKPNKGSEEDVKIPEAIELEELFAVLDKTGESWQTEGVFFKKSLTEKLKEENEESKKRVTRRSIVAEAKKPSEALMKMIFDDINDETKQFLDSAGAVLALKDYKSKESIEMIKIWMDHSLAVNRMLKYFLVKANKTKGVPIDSVISEALKVLLNADDAEWFKWYDALRNYLTKKPQDDAKENKLKLNFENSTLAGGWDMNKESANSCVILKNSDGEMFLGIMKKDKNTLFQKEWTDGRGKNKTILQNPLYKTDKAEIWTKMECDFWADVSKMIPKCSTQLKAVVNHFKKSDNDFIFPVEYRITSGEKFTEEFKITKKEFELNNEVFYKNDISVVAMRYEISDDQEKQYIKAFQKEYWKIILKQEKTSKMFSDQEFFIEWKKYCNKKYSDLSTQEKKYKDALVQWIDFCKHFLSKYPKTKLFEYSFKKTEDYRSIDEFYLDVDICSYKLKIDTKINKSVLDQWVDTGKFYLFEIKNQDSNDKKKENHKNNLHTIYWNAVFQEINNRPKLNGEAKIFYRKAIPAEKLEKVGGRKGKDGKDVIKNFRFSKEKFIFHVPITLNFCLDNPYINDIVNDNLPYKLNTYFLGIDRGEKHLAYYCLIDQNGKIAAQDTLNIPFTNKDGKPRSIKKDKYVYDKKTDKWTLKEVDCWDYNDLLDARASNRDMARKNWQTIGTIKELKAGYISQVVRKVANLATDKIHPTFVVLEDLNTGFKRGRQKIEKTVYQKLEVALAKKLNFLVDKNAKLGEIGSVTNALQLTPPVNNYGDIENRKQVGIMLYTRANYTSQTDPITGWRKTIYLKTGSEGYIKDQIIGNEEKRIKPAFTDIRFDGKDYYFKYETGGVKPKKWSLYSGKDGKSLDRFRGEREENEWQIKKIDVVEILNGIFTSLSFNKNKSLLDQIKAGTEPVKINKHTAWESLRFTIELIQQIRNTGLPEDERDNDFIQSPVRKNEKHFDSREYWDKEQKVEKADMPSSGDANGAFNIARKGLLMNEHIKTWIENGKPKYDAKTSDLNLFISDSEWDLYLADEEVWRKKLPQFASRKAMEENKKIKPHN

SEQ ID NO: 1559 - protein, 1529 aa, unidentified
  REGION 1..1529: note = Cas Enzyme sequence
MPKQTKTPVTQRAYTLRLRGADPNDQSWRNALWQTHEAVNKGAKVFGDWLLTLRGGLDHTLADDAPSDEAQKRRRILLALSWLSVESKLGAPEAFIIPCGKEDANNRNKVIEALEEILKSRSVAQDEINQWKEECKASLCAAIREDAVWVNRSKAFDKAVEQAGCSLTREEVWDMLERYFGGRESYLFPAKGADEESSATDQEDKAKDLVQKAGQWLSSRFGTGEGADFSRMARVYQKISSWAAQAQAGTTGNEAINNLAAALSEFSPASNDLNGVLRLISGPGYKSATRNLLNQLATKTTVYQEDLKRLKEAVDADRVKCQENIGSKGCKPYADVILNHVESACGFTYRTDEEGKDVSVLSYSQYSEDYNWGPARHSEFAVMLDHAARRVSLAHTWIKLAEAERRNFEGNAKKIGDVPKEAREWLDQFCSERSKMSGALEPCRIRRRAVYGWKEVVAAWNKPDCRTAEDRIAAARALQDDPESDKFGDIQLFEALAEDNAKCVWQKDSDNGKAPDSQPLLDYAIAAEADFKKRQFKVPAYRHPDALLHPVFCDFGESRWKIGFSIHEAKSKLETARIKVEKKKEEVAKEKLKFDRAAGQKRIEAEAKLEKTKQDLEIAENELLRLTAMHCMTMTLWNGEKVRPMQLCWQSKKLERDFALKQEKWNDKSVNEVTRADRLGRAAANVTDNDTVTISGLFEQKHWNGRLQAPRWQLETIARHVEKHGWDEKAKKMRARLQWLVAFSAKLQPQEPRCKFAANNQLRTSRQYLLHAEENKKRKGQARLILSRLPGLRVLSVDLGHRYAAACAVWEALSAEDFKKDIKDKRILRGGADPDSLYCLAEGKTAESKKQVTVYRRIGGDTLPDDGKLHPAPWARLDRQFLIKLQGEEESAREASNEEIWAVHQMEISCGRCVPLIDRLIASGWGATEKQKARINALQTLGYKMAGRAEAEEDAASEEEEKSFRPSLSVDELMSSAVRTLRLALKRHGDRARIAHYLMADEKPRPGGIKEKLDETGRIDLLQDALVMWHDLFSSRNWRDDEARNLWDEYVTKLSGYEVPGEISEESSGADRRNKQKENREKLHGAAKALAENATLRETLHAAWKKRWEEDDARWKKQLRWFKDWILPRGTSADDPAIRRVGGLSLTRIATLAEFRRKVQVGFFTRLHPDGTRAETKERFGQSVLDALDHLREQRVKQLASRIAEAALGIGSEAPKHRDMSKRPRRRISDPRFAPCHAVVIEDLTHYRPEETRTRRENRQLMTWASSKVKKYLAEACQLHGSHLREVSAGYTSRQDSRTGAPGIRCQDVPVREFMQSPFWRKQVNQAEKKQAKGDAREIFLSNLNAKWKNKSEAEWEKAGAVRVPLKGGEIFVSSDPLSPAAKGLHADLNAAANIGLRALTDPDWPGKWWYVPCESGSLMPVKDKVEGSAAVKTHKPLCKTIQVQSGAAKDKKRGEKGTGKSKEVINLWRDISSSRLEDGEWKEYASYQSNVQSRVISILEEQIKRCGSHASIGPGELVDCSEKDITDS

SEQ ID NO: 1560 - protein, 1535 aa, unidentified
  REGION 1..1535: note = Cas Enzyme sequence
PRLACCIFSRVVVLGFSTSHCLHWQRNHHPPSYLLTVTGTLPPESDAEIPGNGTYDVVWRELKIGIQNLSASEKKQQLINKTLERFAIEAEVQNKSDAERDHQRECEKLRTDVKAIENLPDTDPKKSTALRKARAAVKKMEDGRAKHIEIFLGGRRKKLAEATIKALKKPIAAKPSELGLAADEMEKVATRAAAIAADSKTVTKPHIRLHYKGGATGNFEKAMLRYWVMKEDDDALVRRAAVADFLRFIQTGEPKPEPKLEEGELIKQMPFSEQGASLAFPYFGKKSLEITSAASSPDSELDKAAFATAAEDVFKYKIRTEARKARVSKVMNVVRAYEGNGGELTADQSPSGKAMKIHGMGGDPRWKGMAEEKKGIEALLKQLGEGKDITSYGLRENTIGGWAEVRKCFLKLKGAKPHDGPSLAKDLEEAVDEEMNANRQGFGSADFFHALCAPEYHHLWSRGADHDRNDVKDFIPHFVGYCEWREELVDLLMNRNGTPIDRATTMSFAELEALFKKPIRYTWPGLLNRHKKPSYRYYDFTANLGTSFQFKSLYRRVRAKDTAGQETLVERYEKLTGDKARVTLAARRLKRDKIVNKDTGSSVDALWCPPLILAGEENSAATKPKAGKKKKSADDPAEVSFSLIAAPLPGDYWNSVATVPTSKIAEPVHLTVSFKVEGAELAKLQKEGVYFAGGSTKGVDENDDNRRFFRWPIDIETDRKSASEATHLPKKKSEVSPGKLWCAFNEGFLVKESRYAKDGETKRVPDFQILSIDLGNRFAAAFTRLRIHAEADGPGRVISADDGAATAIKADVTREGTLRLQGEDAEVWQLVTERNRRHLARKLKARKIDREPVVGSYELVGESYGNGGRGRFPTASEYDIFKNLATLLVPVEALSLSGSERLTYPELGDHLVFRLKRRLGRLRTLFNLVWRLCAEHEREQQTGKRGKARTNVELWFHRRLVVESLARSKFPKRQRQSGEVEEASEASLRIELCADEQWQKLQTDGLLANEKGAAEKKHCADLEARLKDAATWNWNALAVAVKKQIGEYFEGEPTEKTPALHNILVSVIEFCLPLKGRHWDWDRSRIERLHWDRKDEAHNPNVIGMRGLSMRRLQQLLDLRQRCQSYAKLEDRYHGPYKLSDFNPPDSSRDERPDVCSLLLERSNRIREQRVDQTAHLILAEALGMELKNPAEVLEKKTRKNEVDLHGEYQRRTDRSGNSYPRCSIIVMENLERYKMSLGRTRAENSRLMQWAHRAIIEKLEDMCRPFGITLMLVDPAFSSHFDSRNGLPGVRVNLVSGHFAQEHPYKKWVDGKTKSGDDTQLAKDIKALAKMFADNPAYTGELVLAVEGGKEFLPVFTSDGGEGLINADICAAGNIGLRGVTDPQRWDVFPRLRTKRVSDSHFHATNWRGWFGRFAKDDTEKRMLRAAGALHAVQLSVKPKINAEADIAEDGETQTSQSSEHPPFFVEHPNFGWPPEGDWLAHKAYEFQQGGKTLRAFQQGAYLRRVETMCGERIREINRGRVRNRSFADDKIPM

SEQ ID NO: 1561 - protein, 1536 aa, unidentified
  REGION 1..1536: note = Cas Enzyme sequence
MNRIYQGRVTKVEILNGKSADGQPQWRLLGFTPEEAEGLEKERECLRPLTKADSLEGQKARKRLAQINRQLSEPWQTALWQHHELFQDAVNYYSLCLAALAKGLESGEFARNWANQAAERAGNDPKLKKQEDRDKATAEGREMAREQIKAALGWHEAVRKTWTEAQRKAIKFPGPHRRLAGILGVGPDEPDTAKAFDACASKALASCQASQEAKAAALLRLLDLAEAASDLSQFAVSKLPFLCSAPAFFSAGDDQKANDQLSHRQDHVRRILEATPETLPKIAAEIDLKCFYRTPPTKPDYSGEKAQKRLLDCFDGVTKPRKKKPARYPQLLVLRAQFEAELKRLLSLEPDKLRVPDAKKPPGEMAPTAVFKFLPCVETWEVCKSAVAGVIKRTVHENAEPDPLAEVRSGGIVFDYFTNRACVRPKVEKPTRAVWFEFDLAAFMEAIGKPHRYFQDTQKRLKEGAKLRAKRKEIEEGEPAATVDNEDEGVEEEHIVRFGFKDDLRIPLLRELVTKKLGYLADSETPEGPRELVEYTIQERTLRGWTDIHDGWHKLVTDEKWAGLSAKEQEDKLWEVVKKTQGEHRDDFGSATLFRALLEPHFQPIWREDRAKLWHAPDPLRAWRDYTDLRFELADVERPIRFTPAHAVHSPRYFIIPKQGRYGSEHEAGLLALTTGIVLKTERGSEPAKVRIHYAAPRLFRDQLRRVGDSGLESVPWLQPMMQALGLPEPDRTDFSNCRVTLQPESEDNIQLTFPVPVEPVKLQALLGHKDKWNYQPSGKGGEKNFGQFNYSASEPRVETSLRWASDIAFAKEAGQPRKREPEPWYRKMDSFACLSVDLGQRGAGAYARIEARCDGKFGTNKQGQPVPTRFVGETEGKQWCAALASAGLFRLPGEDAKVWREQTELDARKRKPKDSGKPFDMREEFWGDHGRPAEPSEADETAKLMREFEAVEKDAEGREQFPLLPANWRDALTALTFPEQNDKLLIAARRAQSRVARLHRWCWFLADETKRSEAFKEMSDCEDERLLSAAERERAKQNDPRLADNIRTRLEQKQNVLPPLLLQLANRILPLRGRVWAWNPHPDPKAREGRCHRLEMADSPAHKPMIRGQRGLSFPRIEQIEELRKRFQSLNQTLRRELGAAPPKRRDDSIPDPCPALLDKLDEIKTQRVNQTAHMILAAALGLKLAPPPENKAELRSTRDVHGQYVRERPPVDFIVIEDLRAYRASQGRGRKENWRLMRWCIGHVRDKLRELCEPFGIPLVETPAAYSSRFCARSGVAGFRAVEVTPGFTKHGHWAWLAAKKDDEGNPAADVKWLLELDAQLCMSQTDLEANWKVKHPGQPCPKRTALVPQAGGPVFVPVSAAAEGAELVPKVTQADINAAINLALRAIADPKLWSIHPRLRTKRPGESTAKPSKGKATRNKRPASASTDGSPATPMLLTREKRKFGEIGIELKLGQPAKGSALEDTTNPNYFRDFAGVAKWDKAEVQDPVSGQSVTLASGKALWSAVKELQRERCRGINDARLAAWGNKLDPFP

SEQ ID NO: 1562 - protein, 1536 aa, unidentified
  REGION 1..1536: note = Cas Enzyme sequence
MPDQTSPPLTQRAYTLRLKGAQKDDTSWRCALWQTHEAVNKGALVFGDWLLTLRGGLDHTLADASLKSGQEKPDSTLTDEERKARRILLALSWLSVESKTGAPENFIVASGQDSEKNRADCVISALKEILESRKVDKNELDAWINDCSASLSSAIRDDAVWVNRSKAFDEAVKSIGPSLTREEVWDILGCFFGSRKAYLAPGQSSDEDESSEAEQEDKAKDLVQKAGQWLSRRVGRGDGADFLRLSKAYGKISEWADSAQAEMTSKEAINDLAAALSKFAPASNDSDGVLALIGDRGHKSATRNLLSRIALQTTVTQEDLTKLKDLAAQDKVKCATKIGAKKTHPYSDKILEDVESACGFTYLQQSEEESARHFNFAVMLDHAARRVSLAHTWVKRAEAERNKFEKDSQKINCLPEAVRTWLDNFCIDRSELSGALEPYRIRRRAIDGWEKVVAEWSNPSCGNCADRITAARMLQDDPDIGKFGDIQLFEALAEDDALCVWHKNGNINETSDPQPLIDYAAATEADFKKRKFKVPAYRHPDALLHPVFCDFGNSRWNIDFSIKKAFKNLDKQKAFLNKKEEEIIRAEQKLNIKNSKDVESQKKLQQKKEKLKKIQQKIAWLEEKNGVEMALLNNGKIGKMALRWQSKRLTRDLALDQSDNDCGVFHDVSRADRLGRAASNATGGKVNILEIFNQDYWNGRLQAPRQQLQDIAAVRDNPSLQAAERERRMSIMKDRIQWIVTFSAKLRPKGPWCEFAELNQLNIDPKYYPHAEENKSRKGQARLILCRLPGLRVLSVDLGHRYAAACAVWEAVNAEQVKKACQVAEHEAPKASDLYLHLKRKATKQKKGNQVVVEETTIYRRIGADTLPDGKAHPAPWARLDRQFLIRLQGEDEMAREASNEEILNVHRAETELGRTVPLIDRLVKAGWGKTKKQKERLDGLLKSGWKPANEAAAVSDVTDASEDYLGKPSLSVDELMSSALRTLFLALKRHGDRARIAFAMTAEYKTMPGGRKYYFTEAKELSANDDRTTRDNSHTEFIQDALVLWHNLVSSSGWRDGTAKQLWDDNIAKLSGYRALEEICEESSDSERRNKQKENQEKLKDAAAALVADAKLRESLHDTWKKIWEDDDELWKKRLRWFKDWILPRGKAAKDPAIRKVGGLSLARIATLTEFRRKVQVGFFTRLHPDGTKTEITEQFGQSALDALDRLREQRVKQLASRIAEAALGVGRVPRTKGGKTPKRPSARVDEPCHAIVIEDLTNYRPEETRTRRENRQLMSWSSSKVKKYLSEACQLYGLHLREVSAGYTSRQDSRTGAPGIRCQDVPLTEFMLSPFWRKQVAQAEGKGDARDVLIRDLNHMLEDKSASDGEKPKVLRIPLKGGELFVSADKKSPASKGLQADLNAAANIGLRALTDPDWPGKWWYVPCEPGSFRPVKDKVEGSAAVDPKQALRQDAQPQDSDAAADKKKRAKKSTGKSQEKEIINLWRDISSSRPDDTAAGKWQTYDEYQNRVQYRVVDILREQANERKKRTSSRCDKP

SEQ ID NO: 1563 - protein, 1536 aa, unidentified
  REGION 1..1536: note = Cas Enzyme sequence
MPDQTNPPLTQRAYTLRLKGAQKDDTSWRCALWQTHEAVNKGARVFGDWLLTLRGGLDHTLADASLKSGQEKPDSTLTDEERKARRILLALSWLSVESKTGAPENFIVASGQDSEKNRADCVISALKEILESRKVDKNELDAWINDCSASLSSAIRDDAVWVNRSKAFDEAVKSIGPSLTREEVWDILGCFFGSREAYLAPGQSSDEDESSEAEQEDKAKDLVQKAGQWLSSRFGTGKGANFSHMSKVYEKISGWADSAQAEMTSKEAINDLAAALSEFAPASNDSAGVLALIKGPGYKSATRNLLSLIALQTTVTQEDLTKLKELAAKDKVECATKIGAKGHRAYSDKILEDVESACGFTYLQQSEEESARHSEFAVMLDHAARRVSLAHTWIKRAEAERKKFEKDSKKINCLPEAVRTWFDNFCIDRSELSGALEPYRIRRRAIDGWEKVVAEWSKPSCGNCADRITAARMLQDDPDIGKFGDIQLFEALAEDDALCVWHKNGNINEASDPQLLIDYAAATEADFKKRKFKVPAYRHPDALLHPVFCDFGNSRWDIDFSIKKAFNDLDKQKALLNKKEEEIIRAEQKLNIKNSKDVESQKKLQQEKEKLKKIQQKIAWLEEKNGVEMALLNNGKIGKMALRWQSKRLTRDLALDQSDNDCGVSHDVSRADRLGRAASNATGGKVNILEIFNQDYWNGRLQAPRQQLQDIAAVRDNPSLQAAERERRMSIMKDRIQWIVTFSAKLRPKGPWCEFAELNQLNIDPKYYPHAKENRGRKGMAKLILCRLPGLRILSVDLGHRYAAACAVWEAVSADDVKLSCACAGHEEPNERELYLHLKEKKSVEQKNGGKTETEQTIIYRRIASDTLPDGTPHPAPWARLERQFLIRLQGEDEIVREASNEEIFNVHRAEAELGRTVPLIDRLDKAGWGKSRKQKERLDGLRKLGWERVSDGTAQDVPDTGEDYWAKPSLSVDELMSSALRTLCIALKRHSDRARIASAMTAEYKTMPGGRKYYFTGPRELSASDDKSTIDNKHIEFIQDALVLWDGLMTSRGWRDDAAKQLWNNHIAKLSGYKAPEEISDESSKTERKNKQKENREKLRGAAAALVSDTNLREALHAAWKKIWEDDDELWKKRLRWFKDWILPRGKAAKDPAIRKVGGLSLARIATLTEFRRKVQVGFFTRLHPDGTKTEITEQFGQSALDALDRLREQRVKQLASRIAEAALGVGRVPRTKGGKTPKRPSARVDEPCHAIVIEDLSNYRPEETRTRRENRQLMSWSSSKVKKYLSEACQLYGLHLREVSAGYTSRQDSRTGAPGIRCQDVPLTEFILSPFWRKQVAQAEGKGDARDVLIRDLNHMLEDKSASDGEKPKVLRIPLKGGELFVSADKKSPASKGLQADLNAAANIGLRALTDPDWPGRWWYIPCEPGSFRPVKDRVEGSAAVDPNRALRQDAQPQGSDAAADKKKRAKKSTGKSQEKEIINLWRDISSSRPDDTAAGKWQTYDEYQNRVQYRVVDILREQANERKKRTSSRCDKP

SEQ ID NO: 1564 - protein, 1537 aa, unidentified
  REGION 1..1537: note = Cas Enzyme sequence
MRSRRWNPLVATKSYKIRLDLRPGQPIVDPVRFKLRAHEIASTQKWLNETREAFNAGGDYLTGWLLRMHRGAGVWREKRDGIWREWQEITTPKELEEARGRKQKDPDSITPLENRELLEVFAGNGKAEAEAIELAECCRRIAKELCPPSEDSSGAQMPRDDLDLLTSSTSTAKGLRARGPSRSGAAKKISGKRPGWALQKAIGEEAVSAGSLDALITALKKREEFLSAKKDGEKKIAALRSNYSTKPWGDVRTQLLEEDRKQIVELVASAGSLDELCQGLPSLTCIPRADVSKLQKKWRKRFENSSWDDASEKLQLEYRKRWVIAKEKAESIRSKSEESGSIAAYKRLLEAGCLPLPGFASVGAKASIILGPLKLGEVDSEWKRAMWNMAGQRVRSHLGWVRRRANERMLWELRTNLFEHGGWIRTKRDGKAVRQEDLTPDDIRFKAPPDSEIGDFQQRAAYGVCQWVKALRQYETDEIPKHLEGVAFGAAEQPRIRQRTAKGWAKVRDKWIELIDKAQKADKPVPSADDLLEAFDQMRTRKTRDFGDRRLFEWLAGPERRWLWDRSDKENDNDCGRDDRDCVAAFIAHNEHLADKPDSITFTRSDSVKHPVWPFFGENSAVEYWLTREQTPNGGARLVLVLKQLLARQPDGSYSAVDCVKIALRGYEDFEKSFALPDDAGDVSAKQALVFRDDLLGGQTRQGTLSGMKLTWERDELEASNRKSKPTKEQPRIYANFSCDAGEAALPDWLTKHVGSDLKLKKPRDGMTRAFFLKKTISKDGATEDGGAGLPPGQRKWPKEAIENGFTVRGTDLGYRTSSAGASWRLWFDKPAGKVSWQVGTCEEKPVYAVLERTSMVSLPGDGEAVPDDEQALRDRLYSLRTRLNLNNALLRIARLLALDAVIQRKLDGEKKRKRSDGTTKRVGIKWKTETRRLDEAEVTENCRKAAEQLVRWASADAMKESLKAIGHKGSLWHWLAAQDRQLQPLGEKVPTTEVPTEKEAREQGKDRDTAKAKRKSEEDAFAEAVVKLRDPLAKALCDGHDAEKRLRATSGLWFEFDRALLRELSYSDRVNKGDKRIVFETGLFRLLRKPPVTKHRDRKDDANNLPHGRTHRGGLSMARLNFLDDVKNLVRRWSCRPRWPGDVRRVPEDAKFDRCDTEHVDNLREHRAKLIAHADVAQALGFEQDLRRGLWRYGDASGEMLWHCPERGHFYCAKGDARAQRAAPADLNEADALYPHRAYDPAHVLVYEDLTRYKMSSDRPKNENAGLARWSHRRILGFAQHIGGLFGVPVTTVDARFSSRYCSQCGAPGCRAVRFDPAWLNQGWMQRILQSNDIRDAAMKSVANDVRAKIAEKPNAFHREADRPWVLRDGGTHFVCANPNCPVRSAPIDADENAAANIGLRFLRGVDGVRATISANGKVAKSIGYVLPGIMLTQAGGGDSSQGEPYWRDGSADGQSAGSSRKRRESREKRAPESNIEEENEDASGRTRYLFRDPSGGLRCRDHWFEGKVFWGVVAQSCAAGIKAVNASRVGSVDED

SEQ ID NO: 1565 - protein, 1542 aa, unidentified
  REGION 1..1542: note = Cas Enzyme sequence
LSTSDASDWLPLWSRLFQTHYAVCSGAREYGEFYLNLRGGLAASLANCADEPDAERRLLQRGARRMLALGWFAVESVRGAEHHPHRVRERVCAACNSLPKPSCEHDHSDKVSEPKPGQSLPPDLANRLLREILTTHKSITEEAALAEWVSDCVLALTAHIRPDAVIVNRAAAFAEWQNSVGDSGTHMSDQARRILFAMCGDGFASLTLPEEDAVKQDDEQADADSPGADDVEGEDIAKSKGEADDVEPSKASRGVFGDLFGGDPVEKISRAQGKEDFAICVRKMLTEAGNVPPTQNAVIAFRAERGLPDLDTSHPDKYPQEVSSSGRPNDIAKRYRKLLVGLNLWPKSNEESGLPRVQAISSFGKRVTAQDEQSRNAHINALDLINACPEPTASCDGEPDAPSLKRVFTPPWASALAERVAAATNMPVNAKPLNEFKRLMFALAARRISQTQTWTKRNEVERHKAAVKEDAAKKRLEELDPAGSARAWFSEYEKERGEDSQASSDFRITRRMISECDPVFNAWQGTESADEREKETASVQAKTEKFGDARLYADLSEDPAAVAVWQHAEGAEILAQWVKLRQAQYDQQRLKIPRFCHPDPFHHPTWCEFGGSSKPKVWYAWKAGSNPSSAEPGGNADGSRRLWMLLPDFGAGQARAVPMRWRNKRLSQDLGGVRGHTDVQVPRADRLSLAAAKLPLLDANDKSIRYRPEYPFTKDATGWNARLQLDRDTLKRLERHWDDGCREWRDGGKALRNGRWFVTFAPTLAVSDGPGRSIHPKLGWKSSPHFELNKKQKRVGHAELILSRLPGLRILSVDLGHRFAAACAVWETPDAATFDIRKVITDAQAQNWAVDGSADGLFVHIHEPTEKIAKKGRHKGKPVFKTTIFRRVGEDFLRNSKTGVPTTTPHPAPWARLDRQFLIKLPGEDKPARAASQKGQVNEVAMVAKLAADLGLMADEDRDKGREVNELMGRAVRIAALGLKRHARRAKIAYAFDLETQIIPGIGGSEKPFTPGDAAHIKLITDALFDWHALASESKWDDKPARDLWNRHIATTTNGWWLEEPKPPDENSEGPNRQQRRKEDEVLLEKLKPVAEQLAAADRSVVHAAWLDRWQADDRNPANPDMKEKAIGLFAQLRWLTDWIMGGRLPGVDKEDVGWKQNVGGLSLTRIATMKSLYQLHKAFAMRAKPDKPRGAPEKGETNAGVAQSILDAMEQMREQRVKQLASRIAGSALGLGGHWKQAKTRRKNADGLTLMKWVWVEEPTAKYAPCHAIVIENLTNYRPDEIQTRRENRQLMAWSSSKVKKYLSEACQLHGLHLREVQAGYTSRQDSRTGAPGIRCADVPVVDFMTKPWWRRQAKVAQEKADRGDARDRFLVMIEKQWSSKSDSERKFAPAIRIPMNGGELFVSADPCSPAAKGLQADLNAAANIGLKALLDPDFSGKWWFIPCEAATHKPHPEKTKGSFVIPSDLSLISIKSRNLETLDPKIGKNHGRLRAGKKEREIANLWRDISVFPIDANSPWRGTAEYWNDVRFRVISLLHKSRPA

SEQ ID NO: 1566 - protein, 1542 aa, unidentified
  REGION 1..1542: note = Cas Enzyme sequence
MAEQGDSITSTTQRAYTLRLRGADRDDQSWRNALWATHEAVNKGAKVFGDWLLTLRGGLDHALADAKVKVTNKPDRDPTPEERHDRRILLALSWLSVESAPKDNDHHRGFVVATGKDDSPESRNQKVLQRLRELLGKREIIGAELDGWWNDCAPSLSAAIRDDAVWVDRSATFDAAQNPIGPSLTREGVWDMLEPFFGSREAYLTPLASEEKPDEDAAPAEDKAKDLVQKAGQWLSSRFGEGKGANFERMTQVYEAMSAWAKSQTNFSSGSTALKSLATSLASFQPSSNDAEGILKLISGPGYKSATRNIIAAWAGQASEVTPENLKKLADTTADDVLKCKSNTGGKGRRPYSDAILQAVEHASGFTYLQTNGPARHSEFAVMLDHAARRVSIGHSWIKRAESERKKFKADAAKLDAVPPAAKTWLDAFCAERSGNTGAIDAYRIRKRAVEGWKEVVAPWNRPDCKTAEDRITAAREMQADPDIDKFGDIQLFEALAEDDALCVWRVNDAPTAQPLLDYAAGTDALAKQKRFKVPAYRHPDALSHPVFCDFGSSRWDIRFAVHDARLKLAAAKAAVVRIESELQKAQARLNKAKTPEKQTDAQRTLAQAQNKLKEARERVTWLSNNHAISMGLWDGGAIDDCQPLRWSCKRLTSDLNLQPSISDGDPQAVTRADRLGRAAVGASEESSVSILSVFDEKYWNGRLQAPRAQLDEIAAHIKKHGWDEKARKLRDRIRWLVSFSAKLQPAGPWVAYQAKYSDVDPARPFVSRKGDFAVKHETNDKRAGHAKLILSRLHNLRLLSVDLGHRYAAACAVWEAITGEAMRQACQERGHREPRADDLFTHLTRTVQKQITKGRDRGKTKQLNETTIYRRIAADTLADGQPHPAPWARLDRQFLIKLPGEDKPARAASNQGDVNEIGMVATLGADLGLVSDEDRDNGNRDRAIDKLMSRAVRVATLGLKRHARRAKIAYALDPATKTIPGMGGSEKPFTTGDAEHLKLLVNAIFDWHALATESKWNDNASRDLWNSHIATLDGCWRIDEPNPDAQAEQDITRPQRRKNNDALREKLKPIAQKLANAGRTTMHTAWRDRWNRDDGKSADHSACRPSAGFHAHLRLLTDWIMGRRLPGATSNSWRQNVGGLSLTRITTMKSLYQLHKAFAMRARPDKPRGAPEKGESNEGVAQSILEAMEKMREQRVKQLASRIAAAALGLGGHWKKVERRDGSGRVLLDEKGNPRKKRVWVEEPSPKYPACHAVVIENLTNYRPEETRTRRENRQLMSWCSSKVKKYLGEACQLHGLHLREVQAGYTSRQDSRTGAPGMRCSDVSTADFMSKPWWRKPVNIANKKIAENKGDARDRYLKYLDDQLNQLKQQGKSLPPSVRIPVNGGELFVSADPNSPAAKGLQADLNAAANIGLKALLDPDWPGKWWYVPYDSATNAPHVEKTKGSLAIQSDTLFAPTDPHGSDSKSAKKTSAKAGRKQREIINLWRDSSAAPVQADGNWQGTAEYWNHVRCRVIDDLLRQVNQNQDENHQNPVEPPATPW

SEQ ID NO: 1567 - protein, 1543 aa, unidentified
  REGION 1..1543: note = Cas Enzyme sequence
MPELPTTQRAYTLRLRGMSKDDHFWRDWLWRTHLAVNQSARVFGDWLLTLRGGLDHGLAHEPSATDEDIKQEWDRLKKAAKEKSGDKPTREEAVHSLEEQRQARIRDRRIVLALAWLSVESKLGAPERFLVERDTTGHQQPVEALRRILKSRGLGRDDNEEWVEQCRETLEAKIREGEHISDPAVWINRSAAFDAAVKHLGKSLTRDEVWDLFERFFGSQAAYFEMPRGEDSERSDEAAAQEKAKDLVIKAGGWLSNRFGSGTGSDFTAIAAGYEAFAKWSRSVAKKGAASASAIAKSLAAALGQDELPDRLAATPGPSNKVQTAYQRIAEALRKDRVPQEDFVQLAEWSDEQAAEKHGKSGNKGPRPWATAMLHEVEKACGFTYAPTDETGAARHWEFSVILDHAARRVCMAHSWVKRAEVTRRGFVKSLRRMNRVPAKAKAWLDDFCERRGGQTGAVEGYRIRPGAVEGWKELVVAWSRKNCRTEEDRITAARELQASDEIEKFGDIQLFEALAAENEESDARCVWHDDNAEPSAEPLLDYVAATNAAAKMREYKVPAYRHPDELRHPVFCDFGESRWSISFAVHRAASEIEAAQKAVSRAVQLSQKATQKTDKANSDEKRQVAQADLEDAQRKHAEARNYLTWLQSPNGLRIKLWDGSTVEDKNLTWASKRLKHDLDLRAGTQAAGSSNDQTTQSKTISNNPVEVSRGDRLGRAVANVKADQPIEIDGLFGLKEWNGRLQAPRAELDAIADVRDKLKAKNLSRAERDRRAERMLGRLHWFVTFSARLTPRGPWCEFAEENPDLGLRLDPTFWPHADENKQRQGRGRLMLGRLPGLRILSVDLGHRYAAACAVWETVTADALRKACKAAGIASPGASDLFVFVPRADHGYTLFRRIGPDKLPNDSKHPAPWARLDRQFLIKLQGEDQPARWANDDERRFVEKLEKELGYERSDADQRHGSGWRVDEIMSNAVRISRLALRRHGDYARIAEGLIAKERQGMGKNATEKLKGPKLVEHLQDVLVRWHTLATSSRWQDKFSALAWSKHIGPLLQGAALPKVADDMTGSQRKAIQKKVREGLARVAEELACRDRMKMHVEWATQWRKADPGWKQRLKRLREWIAPRGKKSDKTIRHVGGLSLKRIATFKEFSQLQKAFFTRLTLTEDGKLEKETAGLGFGQRLLDQLDAMRENRVKQLASRIAEAALGIGIERPRAQTGRQLKRPRERLDQTPGDESQRRRFAPCHAVVIENLTRYRPDELQTRRENRQLMSWSSSRVKKFLAEACQLHGLHLREVSPGYTSRQDFRTGAPGVRCVDVTVAEFTKRFGRELGRAADATRPDALQRYLLDLRAKHFQQTSQDSLSPRKGHEKIVLRMPRRGGEIFVPAEDVLRPGDQKRTGWTGVQADLNAAANIGLKALLDPDWPGAWWYVPTVAKDGFRVPQPDRTKGCAALEHWQLGRVKDGYGKAGSVEVIDDPNAEKLAKKKPKIGRSKEVVNLWRDVSTAQLSAQTWKVYAAYEALTRWRVIQILRRAAGLPKDFRSAAE

SEQ ID NO: 1568 - protein, 1544 aa, unidentified
  REGION 1..1544: note = Cas Enzyme sequence
MAKKPKTTTRSYTLGLLAPSEADDWLSLWKRLFRTHRAICRGAREFGEFYLNLRGGLPASLATPCDEDNDEKRRRLLQRGVRRMLALGWLSVEDFRGAENHPYRVRELQPGESLSKDLAERLLRDILRTCKGVSQESELAAWVDNCIQALTAKIRTDAVIVNRAASFAAWQATVEDGRAEMPEQAQRILFTMCGSGFVSLTLPDEAAVETDEEELESDDASDSEGDAHATSKSESEEVVEPSNASRGVFGDLFGGSAAEKLSRAAGKEEFAVNVRKLLVDLGDTPPTRETIITFRSQQGLPDLDITKPDKYPAEVTSSGAPTAVAKRYRKLLVYLGLWPKSNVEDGTPRTQAGSSFKNRITATDEHARLAQINSLDLINACPKPEEDEKDSQNNSSPQRVFTPSWADGIAARVADATGMPANARSLNEFKRLMFALAARRISQTQSWTKRNEIERHKAAVKEDAAREKLNELDADERARTWLTAYEDARADRSGAITGFRVTKRMVGECDVVFNAWATAATTDERDEKTASIQAEAEKFGDPTFYADISADPAAEVIWQHTQGAEILHQWVKLRQAQHDQQRFKIPRFCHPDPFHHPTWCEFGGSSKPKVWYSWNPSTKPQKPEPGGNGDGTRRLWMLLPNFESNETKAVPMRWRCKRLSRDLGGVNDVEERMIPRADRLSKAAANLPLLDKNGKPIRYRPSHPFGNDAKGWNARLQLDRATLEELEKQWDDKRGHWLDEGRALRNARWFVTFAPTLAASEGLGRTIHPKLGWMGFPHAELNKKQKREDHAKLILSRLPGLRVLSVDLGHRYAAACAVWEAMTREGMCGACGKNGHAEPRASDLFIHLTRTVQKQVTKGHDKGKTKSVVETTVYRRIGADTITDPKTGEVSPHPAPWARLDRQFLIKLSGEEQPARAASNKGGVNEVAMVAAFARRLGLNSDDDREKGRGVDRLMSRAVHIATLGLKRHARRAKIAYALDPATKAIPGMGGSEKAFTVGDDDHIKFLADTLFDWYALASDSEWDDKAARDLWNQHMATNDRDFHIPDPQPVDASAEQPTRQQRRKKDDALREGLKPLAQRLATTDRMTIHAAWRDRWVDDDGTPALDDGTSTRLSIGWYAELRRLTDWIMGRRLPGATNNGWRENVGGLSLTRIATMKSLHQLHKAFAMRAKPDKPRGAPEKGESNAGVAQSILDAMEKMREQRVKQIASRIVEAALGVGIERERVWDDVKKKWRYPKRPRGLLYHVDEQGVAHGDPRFKTCHAVVIENLTNYRPEETRTRRENRQLMSWSSSKVKKYLSEGCQLYGLHLREVQANYTSQQDSRTGAPGMRCADVPVHEFMTARWWRKQINAAKKKRDEKKGGDARDRYLLDLDEHCGKVPQEKWKDQRALRIPNKGGEVFVSANPHSAVAKGLQADLNAAANIGLRALLDPDFLGKWWYMLCDSATGQPAKDKCAGAACLDFDKALLESQEPKEQKRPKKKSRSGEKTEKTNAWRDVGSAGEWRVHAAYWNDVKARVVARLRAANGLNVPYEAEPLAAADTRT

SEQ ID NO: 1569 - protein, 1544 aa, unidentified
  REGION 1..1544: note = Cas Enzyme sequence
MADENGREQPVVTTQRAYTLRLSGTDKNDNSWRDRLWKTHEAVNKGAKVFGDWLLTMRGGLCHTLAEADIPGKGKKPALRPTPQEIKNRRIVLALSWLSVESKCGAPESYIVPHDSNTATGERKYWKTVEALREILRSRGLTEERADEWADDCRDSLSATIREDAVWVNRSRVFDLAATKIGASLTREELWDFLQPFFANKHSYLEMDTVASATNGDSGTDTEESKVDSSDEKAKDLSQKAGQWLSSRFGTGTGADFSRFSKVYEVLAAGCQSIAAGVSGAEAINRLATAMEEYSPHSKDIEGILGLISGPGYKSATRNNVLPQINSLQRVSQQDLDRLRDACEKDAVQSRQRVGGKGSRPYANAILRDVEVACGICYAKTAGGPSRHWQYAVILDHAARRVSMAHSWIKRAEEQRSKFEIERNKLDHVPHDARAWLDAFCNRRSSESGATDAYRIRRSAVGGWKQVVAEWAALPATAENAGSELLSGPELARIRAARELQDTVEKFGDIQLFEALSATDARCVWQPDGKSDAQPLLDYVAGTDAISKRQRFKVPAYRHPDALLHPIFCDFGNSRWSIDYAIHRAPKELTHAKQLLEKKKAEIDKAELTLAKANGTAKRADISEKIKSLRAAFIQQQSKVACLDSRHAMTMGLWDGSRIEDTPLRWQSKRFASDIGQPLSAHSLPVSRADRFGRASVAAEDNSPVKPSGLFDLPDWNGRLQAPRRQLEAIAAMRDSAKLSAGEKQHLVAKRIHSIRWLVTLSAKLQALGPWFEFAGPRGLLEYRNGEVVLSPRSSKDSWRGLAFPFWHPHNLKGRGGAVRHVLSRLPGLRVLSVDLGHRYAAACAVWETVSTGQIQKACLDAGMEAPGPHPLYLHLKQIVDGKEKKTIYRRIGADTLPDGSPHPAPWARLDRQFLIKLQGENRDARPATSEEVAAVEQMENELGVVRQLKRKGQELLVDELVFDTLRTLRLGLRRHGTRARIAFNLTATKRIRPGGIQEVLDQEGRLSLLKETLLLWYEVYSGERWRDKPAEDLWNRHIQPLLGGTILQDTVNQEDIPSAAKRRKQREETSEKLRPVAEQIAKNDSLCRQLRVLWSAQWQTEDAIWRTRLRWMRRWLLPRGIKRDAQLRKSIRDVGGLSLTRIASFKLLYQVQKAYRMRPHPEDPERNIPKRGDSSLEDFDQRVLDAMERMRENRVKQLASRIAEAALGIGDEAGIHSKDGRQKKRPTERSRDSRFASCHAVVIEDLTHYRPDETRTRRENRQLMSWSSSKVKKYLGEACQLHGLHLREVSPAYTSRQDSRTGAPGLRCNDVTVEEFKKSLFWRKQVGAAEKNREAGNKGDARERYLLWVDEKISADETKETDSFLIPSDGGEMFVSAFEDNKTQSASRRKKPSALQADLNAAANIGLRALLDPDWEGRWWYIPCDAATFCPDTKKFIGCKAVDPSKPLRVVAEEGAISASGIGSKKSGRKRNAAIDGTRIVNLWRDPSSMPVHLDASGSGEWQRYHEYKNNVQSRVIQNLKARYKQTWQQENAFVPQNEDTPF

SEQ ID NO: 1570 - protein, 1545 aa, unidentified
  REGION 1..1545: note = Cas Enzyme sequence
MMMSQKEKPATTQRAYTLRLRGVNPNDNSWRHALWQTHEAVNKGAKVFGDWLLTLRGGLDHSLVDTNNSDRTPTDEERKARRILLALSWLSVESERGAPETYIVASGKEASTDRDIKVIAAFEEILKKRKLSDDEIKGWIDDCKASLSAAIRDDAVWVNRSKAFDDAVKRIGDSLTREEVWDMLDYFFVSAEAYLKPIKISGDESTDTEKEEKAKDLVQKAGQWLSGRFGSGKGADFPRMAKVYERIVQWADQAEADTAGGKAISNLVEALKEFKPASEDLDGVLGLISGRGYKSATRNYLQQIHTKSNVIEEDLDNLKKKADEDRKKCLGKSGSKGQRLYADAILDDVERDCGFTYRVAENGEHVSVLDYSKYKEGCKWGTSRHQEFSVMLDHAARRVSLAHTWIKRAEAERRKFEEDAKKKDSVPKSASKWLDQFCEERSEASGALEPYRIRRKALDGWKDVVEAWSDKSCKTNTDRIEAARALQHQIDKFGDIQLFEALAADDARCVWHKDGNETASPDPQPLIDYVLAAEAEFNKQRFKVPAYRHPDALLHPVFCDFGNSRWSIDFSIREATTELNKAKKKLQKTEEAFTKATNVFVTDRENGKKREKLEKAKKELTDARQEVKRLSSARRLSMTLWTGRVLENKFPLCWQSKRLVQDLALSQKEQKCEATEVTRADRFGRAASNVTKSDDVEISGLFEQKDWNGRLQAPRQQLEAIAKVRDNDSLPTEERDRRICKMKDRIRWLVTFSAKLQPMGPWCDFAEKHRELELKIDPQYWPHAEENKKRKGQARLILSRLPGLRVLSVDLGHRYAAACAVWETVDSRQVEEACKDANHERPKSEDLYLHLKKRKNVGNDVEKTIIYRRIGADNLPNGTPHPAPWARLDRQFLIKLQGEEEGARMASNEEIWAVHQMEAAFGRSVLLIDRLVASGWGSSDEQKARLEKLKGLGWTPAKQPSSNYESDLDQGEFFKPSLSIDELMYSAVRTMRLALKRHGDRARIAFAMTAEYKTMPGDRRYYFTESKELSVEDNQEVRDIKRVEFIRDALVLWYDLAYSQGWRDNKARQLWDEYIAKLPEYGAFDEKIEESAAQGDKKRNEEIKKKLNNVAEVLGKNESLRKDLHDAWQCRWEEDDDQWKKQLRWFKDWILPRGKAAKDPAIRGVGGLSLTRLATLTEFRRKVQVGFFTRLRPDGTRAETKEGFGQSTLDALENLREQRVKQLASRIVEAALGVGRVKRPAGGKDPKRPDRRVDEPCHAIIIENLTNYRPEETRTRRENRQLMSWSSSKVQKYLSEACQLHGLHLREVSASYTSRQDSRTGAPGMRSQDVPVAEFMRSPFWRKQVKQAQENVSKNKGNKRERYLCDLNEMWGDKQPADWKEAGDVRIPLNGGEIFVSADSTSPAAKGLQADLNAAANIGLRALIEPDWEGKWWYVPCDAAGSPVKDHVEGSQVSGLNQALRQPEQAQTNEANTETKKRKSGRGKSREVINLWHDISSSELNDREWKDYNAYWNGVQYRVVSNLNQQMNGRNKKRQVDLGDDDVPF

SEQ ID NO: 1571 - protein, 1546 aa, unidentified
  REGION 1..1546: note = Cas Enzyme sequence
VANAKVKTTTRSYTLSLNAPSDTTDRSPLWHRIFRTHYAICCGAREFGKLLLDLRGGLPTSLAQLGEGIAENDRRQTQRGTRRILALGWLSVEDLDHARNDPHRVQDTAPGSPLDQDLAEKILRKILITKGIKSEEEQSNWISDCLPALTANIRPDAVWVNRAESFAQWQRGTQPGAQPPTPEEAQQILFSLCGESLVTLTLPEQPAAAGQKQPDQETSPDPEEQTDRPPAAPSADDEMDPSNASRGIFGDLFGENAEGKRSRSQGKDNFACAVRDFLCANPTPSADAITEFREKQKPREPNPPGPEKYPPEVSTSGAPTAVAKRYRKLLVCAGLWPKSADEDGSSRNSAKTKFADPKEPQKTEIQINALDLIDACNQAAPADDSGTSPKAGRVFAPAWASNIAEKVASATQMPANAKSLNEFKRLMFALAARRFSQTQSWTRRNEAERHMAAARQDAAVARLREIDPDHKAQDWLRGYEQRRADQSGSNGEFRITRRMIGEAEAVFKAWAGTNSAAERELKTVAVQTTAEKFGDAALYSEIARNTAAEAVWRSGSAPEILDQWVKLRKAQSDQQRTRVPRFCHPNAFRHPTWCEFGESSKPGVWYAWNPKSKPRKPEVGGEGDGTRRLWVLLPDFNSGIGQAVPLRWRSKRLSKDLGEALQPSDAPIPRADRVSIAAAGLNLEGANGVPARYRPSLPFSENTKGWNARLQANRTALLHLESKWDAEAATWRDGGRSLLALKWFTTFSPELAMSEGPGRAIHPKLGWNSEPHSDLNRAQKRGGNAKLILSRLPGLRVLSVDLGHRYAAACAVWETLTTEQMNAACQAKNHTQPAESDMYVHLAHPTERVVKSGRKKGQNLIQTTVYRRIAADTLPDGTPHPAPWGRLDRQFLIKLQGEQRPTRAASKNEADLANALFHRLGLRSDADSENKSRAVDKLMARTVRVATLGLKRHARRAKIAYALDPNTKAIPGMGGSSAAFTPGDEPHIHLLTDALFDWQSLATDAKWDDAHARSLWNHHIATLPGGFHLENPTPRDESAHEPSRQRQRSGDDALRATLKPIAEKLSKADRQEVHAAWKKYWGDSDGQSAIVPKVLQGQRGPEKTTPSASASGWHGKIRWITDWIMGKYLEGCTGHAWKHDVGGLSVSRITTMKSLYQLHKAFAMRATPEKPRGAPEKGESNLGAAQGILTAMESMRQQRVKQLASRIAEAALGAGIERRSDNGRELQRPRERVDDPRFAACHAVVVEDLTNYRPDEMQTRRENRQLMQWASSKVKKYLSEACQLHGLYLRGVPAGYTSRQDSRTGAPGVRCGDIPVEELMAAPRWRRQILTAEKTRRENNTGTARDRYILTLDEKYRLLTAEQRKKTPPARIPVKGGDLFVSADPDSPAASGIQADLNAAANIGLKALIDPDWPGRWWYIPCDATTHKPSPERTRGSAAVDCDVPLGPDSTGTPEDRDAKPKKNQRNSKIAGRGQSAIINLWRDPTHLPIKENPSAWCESKKYWNQVEHNVVKVIESKGQKLTQTAEAATGESASSPPIAPTDVPW

SEQ ID NO: 1572 - protein, 1546 aa, unidentified
  REGION 1..1546: note = Cas Enzyme sequence
MMMSQKEKPATTQRAYTLRLRGVNPNDNSWRHALWQTHEAVNKGAKVFGDWLLTLRGGLDHSLVAADNSDRNPNDEERKARRILLALSWLSVESERGAPEKKYIVASGKEASTDRDIKVIAALEEILKNRKLSDDEIKGWIDDCKASLSAAIRDDAVWVNRSKAFDDAVKRIGDSLTREEVWDMLDYFFVSAEAYLKPIKISGDESTDTEKEEKAKDLVQKAVNWLSSRFGSGKGADFPRMAEVYEKIVQWADQAEADTAGGEAISNLVEALNKFEPASEDLDGVLGLISGPGYKSATRNYLQQIYTKSNVTEEDLDNLKKKADEDRKKCLGKSGSKGQRLYADAILDDVERDCGFTYRVAENGEPVSVLDYSNYEEGCKWGTSRQLEFSVILDHAARRVSLAHTWIKRAEAERRKFEEDAKKKDFVPKSASKWLDQFCEERSEASGALEPYRIRRKALDGWKDVVEAWSDKSCKTNTDRIEAARALQHQIDKFGDIQLFEALAADDARCVWHKDGNETASPDPQPLIDYVLAAEAEFNKQRFKVPAYRHPDALLHPVFCDFGSSRWSIDFSIREATTELDKAKKKLQKAEEAFMKATNAFETDQENGKKREKLEKAKKELTDAQQEVKRLSSARRLSMTLWTGRVLENKFPLCWQSKRLVHDLALSQKEQKSEATEVTRADRFGRAASNVTKSDDVEISGLFEQKDWNGRLQAPRQQLEAIAKVRDNDSLPTEERDRRICKMKDRIRWLVTFSAKLQPMGPWCDFAEKHRELELKIDPQYWPHAEENKKRKGQARLILSRLPGLRVLSVDLGHRYAAACAVWETVDSRQVEEACKDANHERPKSEHLYLHLKKRKNVGNDVEKTIIYRRIGADNLPNGTPHPAPWARLDRQFLIKLQGEEEGARMASNEEIWAVHQMEAAFGRSVLLIDRLVASGWGASHEQKARLEKLKGLGWTPAKQPSSNYESDLDQGEFFKPSLSIDELMYSAVRMMRLALKRHGDRARIAFAMTAEYKTMPGDRRYYFAESKELSVEDNQEVRDIKRVEFIRDALVLWYDLAYSQGWRDNKARQLWDEYIAKLPEHGAFDEKIEESAAQGDKKRNEEIKEKLNNVAEVLANNESLRKDLHDAWQCRWEEDDDQWKKQLRWFKDWILPRGKAAKDPAIRGVGGLSLTRLATLTEFRRKVQVGFFTRLRPDGTRAETKEGFGQSTLDALENLREQRVKQLASRIVEAALGVGRVKRPAGGKDPKRPDRRVDEPCHAIIIENLTNYRPEETRTRRENRQLMSWSSSKVQKYLSEACQLHGLHLREVSASYTSRQDSRTGAPGMRCQDVPVAEFMRSPFWRKQVKQAQENVSKNNGNKRERYLCDLNEMWGDKQPADWKEAGDVRIPLNGGEIFVSADSTSPAAKGLQADLNAAANIGLRALIEPDWEGKWWYVPCDAAGLPVKDHVEGSQVSGLNQALRQPEQAQTNEANTETKRRKSGRGKSREVINLWHDISSSELNDREWKDYNAYWNGVQYRVVSNLNQQMNGRNKKRQVDLGDDDVPF

SEQ ID NO: 1573 - protein, 1546 aa, unidentified
  REGION 1..1546: note = Cas Enzyme sequence
MIAVDSGKEQPIVTTQRAYTLRLNGADKNDNSWRERLWNTHEAVNRGAKTFGDWLLTMRGGLSHTLADLGIHGKGNKPERKPTQQEINNRRIVLALSWLSVESEHGAPKDYYVPHDLDTNTGERTNWKTIEALREILKCRGVSNEEIENWLAACKDSITATIREDAVWVNRSNAFDNAMKVVGESLSREELWDLLEPFFASKQSYLELNTATDVQQEQSDENAEESKELSPDKAKDLSLKAGQWLSSRFGTGKGANFQKFAEVYDALALQCKSIKPATSGTEVCKCLASAVSQFAPHSQDLNGLLELISGPGYKSATQNTLKRINALQSVSGEDIQKLRGNCEADAAKSKQKTGSKGNRPYADVILREVEAACGITYLGTSDGPSRHWQYAVILDHAARRASMAHSWIKRAEEQRSKFEVERNKLNNVPVDAREWLDAFCAQRGSDSGAKDAYRIRRGAVDGWKQVVAAWVDSLGATENAGSELLSEAEALRIQAARELQDSVEKFGDIQLFEALARTEAKCVWTTNGKTDAQGLLDYVAGTDAIAKKRRFKVPAYRHPDALLHPIFCEFGNSRWSIEYAIHRAPAGLTKAQQLLEKKRTEIAKADLALAGATGTPKQTLIEEKLEKLRSAFKQQDAEVAWLGSHHAMTMGLWDGRHIQDTQLLWQSKRFGSDIGQPEVAAPLLVSRADRFGRAAVAIKEYSSAIPFGLFDLKDWNGRLQAPRRQLEAIAAIANRTNLTAEQKKQLVSKRISSIRWLVTFSAKLQSQGPWLEYATKHDLFEKRNGEIVSSPAQTRDAWRGIAFPFWHPGNPKGKGSAVRHVLSCLPGLRILSVDLGHRYAAACAVWETLNSEQIQEVCGNSGTEAPGPLALYLHLEKVSNGRTRKTIYRRIGADRLTDGSLHPASWARLDRQFLIKLQGEDRDARPATSEEIAAVDQIESALGFVRQAQRTGSDLLVDELMSDALRILRLGLRRHSDRARIAFNLTATKRPFSGGREEPLDKDGRIGLLQETLLTWHELNVADRWKDDVAEEMWHQHINPLLEDQVSIEVDNQDGSVTSARRRAQRELLIQKLKPIAIHLENNDSLCRQLQSLWNAQWQAEDRAWRARLRWIRRWLLPRGVKRDKDSHKSIRHVGGLSLTRIASFKVLYQIQKAFHMRPCSEDLKRNIPDRGDNRLEGFGQSVLDAMERMRENRVKQLASRIAEAALGIGSETDRRNKNGTQNKRAVEQSEDSRFAPCHAVVIENLTHYRPDETRTRRENRQLMDWSSSKVKKYLSEACQLYALHLREVPAAFTSRQDSRTGSPGRRCNDVKISEFASLSYWRKQVKAAEENQKKGNNGNARERYLLWIDKKISSGQSKQTDSFLIPSDGGELFVSAHKTGESQTFGKRKKLATLQADLNAAANIGLRALLDPDWKGAWWRILCDPTTFIPDKKKYAGSITIETSKALRVMAKVKLDVLMSADKAKQSAQNKGKRSNADGNRLMYLWRDPSSQPVHPDVLDGGEWQFYPEYKNGVEDRIIRKLLKSYDRTSRQDNQFVPGDEDIPF

SEQ ID NO: 1574 - protein, 1550 aa, unidentified
  REGION 1..1550: note = Cas Enzyme sequence
MNRIYQGRVTKVEILNGKNADGQPQWHLLGFTPDEAERLEKERERLRPLTKEDSPEGENARKRLADINRRLNEPWQTALWQHHELFQDAVNYYIVALASLGRSPDSPLTKLSSRISAVWASVEKQGQLREGMGASLAKRFGFPVHEASLSRIMETVHDGGLPDAEAAEKAGELILEKAKGASGIQQQGPVFWPQLCNPNFTRRGNLAGGAADKLKAQGTFMLSTRLHEIKTRAEMKEFAKQCHLGWVVKTNPAGATHGDSKARLRDSVIHFLKLYEDSLAKESTNKNRPDTVDWLKGQANAEGELRSLLTGVEKSQNLAPILRNNRGPDADKTEALLLFQFKSGEFTAGLLKHLFPHDPEAQSPSEATGESDGGVVARARGARGYLIRAFSSFPFFGGKSSADFESSGWGAAFDIAAFKEALTIVSQFNKNDADRKAKTKDRATRLLMMAGETVIGEYSGQSDVDEPIRHQLQTIWKESKGKPKLEAPATSGSNEDSQIPNFLGDPRIARLREIVNKDLAEEYRLTEGRDTPYGLRRRTMKGWSDVRRKWQTIVKAGASFSEAKKEKLQKALDDLRTDKPEQIGSHRLYEALITSEESWRIWREPTDEEAEQIVRRGWASDPLESFRIYCETKETLEDLVRRKLNFTPADARHSRRLFSFTDACSSFGNPGGEFKHDPKALAVTVPISAINAQGRFERTTIRAIYAAPRMLRDQIRAMDGRYVQRWVQPMVAALCPATTSLPTQKELAAAAVELMPDWDKDDQRRFLLNFALDLSPVDLWKRIYELRGQAQQFGTRFSPRDRKRETPLHAGLWEASIRTFWEGDAPRLRDVLLWPTDSFKKQAWHPAPWWEQVNSFRVLSGDLGTRHAAIIALVEASAGEPDKPSTARFIGEAGGRKWFAQYRTGKILRLPGEDGQSYRHQTRLDVERGESPLDRKHDKAFREELHGARGRLAGDDETKQFRNIVRDLGYEDLLPEACRPETALPRLRSQFSFPEQNDKLLVALRWAQRHIADLISQHWRLVKPEKPAQTAVALKELREQKRYPEVAKMAADPAQADELIRFVHSRITELRQVVQEHLLALTGRILPLRERSWEFVAHPQTDHFSGCHLLQPTDRGTGSKNKKLPGQRGLSMARIEQLSELRRRWQSLNQSLRRPIGEPPLTAAEMRANPIPDPCPHILRKLDDIREQRVNQTAHLILAEALGVRLIAPEKDPREREEADIHGEYVSLRPPVDFIVLENLDRYKAAQGRAKSENSRLMQWCHRAVVDKIKELAEPFGIPVLETPAAYSSRFCSLTGIAGFRAVEVGLPDRDDYRWRKLLREADERGEVASDGAKAARRLFSSLEQANAGRVGKQLRTLLAPQVGGPIFVTATAVPHPTARNEHKSSPTLVPPMQSDLNAAINLALRGMAHPDRADIHHRVRTERVNPKEANQKQIAASSVFRTREKRRFGEQQPQIVTAPGDSLPRERNSNLFYDPWSVALFGRARWDSEPEGSFSYASGPGLWKRVNDSAFQWQRCEEINRQRMERLGFKATSKAQVRGLEAEEDDISM

SEQ ID NO: 1575 - protein, 1553 aa, unidentified
  REGION 1..1553: note = Cas Enzyme sequence
VPKRVRTQTRSYTLRLAAPTGVAEWLPLWDRLFRTHYAVCRGAAEFGELYLNLRGGLSPDLADLRDPTVAEGRWEYVRRGRRRMLALGWLSVEDKRSATTHKFRLPQVQPGQTLSDDEASSLLREVLTTKAVRDDTLQKEWIRDCIGALTARIRPDAVWVNRAAAFRKWQEEHPSCANEMAEQARIILFNMCGSDFVNLALPEDKAIDGNVDLEDSEEAEPNDEVEKGELVGEQQNPSNASRGVYSDLFGGDSVKKVARSKGKQTISAKLATFLRSRDRCCPIRDQIIQWRQENGLPPFDTVSSNPYPPEVTSSGAPTAVAKRYRKLLVSLGMWPQSNDEDGKPRQQAETRYVKSVAGELPDTKKVQVNALDLLAACDEIKESEKDNDRVFNPAWAVSIARRLSEVSGLNSTDKSATEFKRLMFAIVARRMSQTQSWIKRNEVERHKATVRRDAVLDRLRLLDLTQKAQNWLRNYEQVRGETSGAIAGYRITRRAIAECDEVIASWKDTTTGEDRDKQTAEMQARSEKFGDANLYYDLARDTLAEAVWHAPDGSPSSEILKEWVKFRQAEYDQGRLKIPRFCQPDPFHNPTWCEFGGTSKPKVWYAWNPRTRPSKPEQSGETDGSHRLWLLLPDWGKNQTLPTAFRWSSKRLWRDLGGDTIYVEEIPRADRLGVAVAGLPATARDGEMRHYRPAYPFSEDAKGWNARLQVARDALSEMERAWDEDRKQWLDGGLALKRLRWFVTFAPSLAVAEGPWGKLRAKLKWKKFPPAEVNERQKRQGSAKLILSRLPGLRILSVDLGQRFAAACAVWEALSTEEFRNECNAARAKPGFDVTVTDLYTTIAGPGERSKGASRKAQAEGRDSFRPTTLYRRIGEDFLRDNKTGKLTDGAHPAPWARLERQFLIKLQGEELPARAASQDIEMEMVERFARRVGFENADLKLPRRIDELMARTVQIARLGLERHGRRARIAHALDPQTHSVFGIGGKEIPFQQGDETHVKLLTEILFDWHALASEGKWNDVKARELWNVHVSALSVGSRIENPTSGAAADDDRTRLEKRKDDDVLRERLKPLAKVLAETDRAAMHTAWKNRWEDDDGLERDESDYEHDKKGGITKAKRQTSGWHADLRLFTDWIMGWHLPGVTSKLWTRNVGGLSLTRIGTMRSLYQVQKAFAMRARPQNPRGAPEKGESNTGVAESIRVAMERMREQRTKQIASRIVAAGLGMGGHWKHAEVWQRTPDGTREAKKKYVWVEEQSPKYKPCHAVVIEALRNYRPDELQTRRENRALMNWSANKVRKFLEEACQLHDLHLREVVPNYTSRQCSRTGLPGVRCDDVRVEEFLTAPWWRKRVKSAYNRKAKPAREHPYDAEHQMLVALDERWPECQKVPEALRTDYERKVKSANPIRLPRKGGNLFVTAIPWSCAANGHRPCSRCRSFRALQADLNAAANIGLRALLDPDFPAKWWYVPCGANDGKPAKDKVSGAVCFGLMPKFVEVSEAKRDYVNAWRDPSSRPFPDCDNKWSETSKYWNGVRSRVITTLRVFNGLVPDTSTIDA

SEQ ID NO: 1576 - protein, 1554 aa, unidentified
  REGION 1..1554: note = Cas Enzyme sequence
VYTGGQGLPLHAGNRKLCFEKFHNQEIASLAAMSFKGAVLHVSSENRKEMDMTQQNRPSVTQRAYTLRLYGANSEDASWRKALWLTHEAVNNGAKTFGDWLLTLRGGLDHTLADAKVKGAKGKPDRDPSIEERKKRRILLALSWLSVESKRGAPAAYIIATGREITENRNSKVVAAFEEILKSRGLTDTEIAEWRSDCTASLSATIRDDAVWVNRSKAFDDAAKSVGRSLTREQLWDMLDPFFGSRDAYLAPTKSSEDDSLEEEQGEKAKDLVQKAGKWLSSRFGTGEGADFSRIADVYEKITAWADAFQVGKTTTGDEAIKNLAAALSEFKPVSNDLTGVLRLISGPGYKSATRNHLNSLFGKKRINQEDIQILKTKAANDAQQCRQNTGSKGYRPYANAILKDVEDACGFTYRTDKDNKDVSVSDYSKFEDGYRWGPARHSEFAVMLDHAARRVSLAHTWIKRAEVERRRFEDDALKREQVPENVKKWLDDFCWKRSEASGALESYRIRRRAVDGWKNIVGAWSKAECRTMEDRITAARALQDDPDIEKFGDIQLFEALAEDDAVCVWYKDGDPAKEPEPQNLIDYALAAEADYKKRQFKVPAYRHPDALLHPVFCDFGESRWDISFSVHQQERNKSKLNNKKMITQGSPLRGLSLTLLTNIGIKPVLLCWQSKRLARDLALVSNADKGHVVNVSRADRLGRAASAVTENDTVAIESIFEEKKWNGRLQAPRRQLEAIAAVQNNSRFSAEERARRIQRMRERIRWVVTFSARLQPQGPWCEYAEKHRFKPDPRYWPHAEINKNRKGYARLILSRLPGLRVLSVDLGHRYAAACVVWEAVDAAHIKEACRAAGRESPNESDLYLHLKTKGQDGKERITIYRRIGADALPGNTPHPASWARLDRQFLIKLQGEEEGAREASNEEIWAVHRLESGLGRVAPLIDKLIAAGWGGTDKQKARLEALKQLGWSDRTAAASAGAGAEADEESGGIVPSLAVDELMSSAVRTMRLGLKRHGDRARIAFYLVTEEKTMPGGVKNKLDEQGKIDLITDALILWHDLFSSRGWCDDAAKKLWDDYIAKLSVYRALEEGDKDDSGSERRKQKDENRRKLYNVAEALLQDTDLQQRLHNAWKKRWEEDDEWWKRQLRWFRDWLLPRGKHTRDPGIRKAGGLSLIRIATLTEFRRKVQVGFFTRLRPDGTREEIKEQFGQSTLDALEHLREQRVKQLASRIVEGALGVGSESPRHWDGCKRPRRCINDQRFAPCHAVVIEDLTHYRPEETRTRRENRQLMIWSSSKVKKFLSEACQLYGLHLREVSPSYTSRQDSRTGAPGIRCQDVSVCEFMRSPFWRKQVKKAKAKQDKNEGDAREKFLCDVDALWNDKTAADWVKAGFIRVPINGGEIFVSADPNSPAANGLQADLNAAANIGLRALSDPDWPGRWWYVPCERADFRPVKDKVEGSAVVKLNQVLRQPTQGKKDGINKKKKDGDSRVVATNEVVNLWRDISSLPLESAEAGEWKEYAAYTKEVQYRVVNILKKQIQGRCGQPHDRHREDDISF

SEQ ID NO: 1577 - protein, 1557 aa, unidentified
  REGION 1..1557: note = Cas Enzyme sequence
VLLVYTGGQGLPLHAGNRKLCFEKFHNQEIASLAAMSFKGAVLHVSSENRKEMDMTQQNRPSVTQRAYTLRLYGANSEDASWRKALWLTHEAVNNGAKTFGDWLLTLRGGLDHTLADAKVKGAKGKPDRDPSIEERKKRRILLALSWLSVESKRGAPAAYIIATGREITENRNSKVVAAFEEILKSRGLTDTEIAEWRSDCTASLSATIRDDAVWVNRSKAFDDAAKSVGRSLTREQLWDMLDPFFGSRDAYLAPTKSSEDDSLEEEQGEKAKDLVQKAGKWLSSRFGTGEGADFSRIADVYEKITAWADAFQVGKTTTGDEAIKNLAAALSEFKPVSNDLTGVLRLISGPGYKSATRNHLNSLFGKKRINQEDIQILKTKAANDAQQCRQNTGSKGYRPYANAILKDVEDACGFTYRTDKDNKDVSVSDYSKFEDGYRWGPARHSEFAVMLDHAARRVSLAHTWIKRAEVERRRFEDDALKREQVPENVKKWLDDFCWKRSEASGALESYRIRRRAVDGWKNIVGAWSKAECRTMEDRITAARALQDDPDIEKFGDIQLFEALAEDDAVCVWYKDGDPAKEPEPQNLIDYALAAEADYKKRQFKVPAYRHPDALLHPVFCDFGESRWDISFSVHQQERNKSKLNNKKMITQGSPLRGLSLTLLTNIGIKPVLLCWQSKRLARDLALVSNADKGHVVNVSRADRLGRAASAVTENDTVAIESIFEEKKWNGRLQAPRRQLEAIAAVQNNSRFSAEERARRIQRMRERIRWVVTFSARLQPQGPWCEYAEKHRFKPDPRYWPHAEINKNRKGYARLILSRLPGLRVLSVDLGHRYAAACVVWEAVDAAHIKEACRAAGRESPNESDLYLHLKTKGQDGKERITIYRRIGADALPGNTPHPASWARLDRQFLIKLQGEEEGAREASNEEIWAVHRLESGLGRVAPLIDKLIAAGWGGTDKQKARLEALKQLGWSDRTAAASAGAGAEADEESGGIVPSLAVDELMSSAVRTMRLGLKRHGDRARIAFYLVTEEKTMPGGVKNKLDEQGKIDLITDALILWHDLFSSRGWCDDAAKKLWDDYIAKLSVYRALEEGDKDDSGSERRKQKDENRRKLYNVAEALLQDTDLQQRLHNAWKKRWEEDDEWWKRQLRWFRDWLLPRGKHTRDPGIRKAGGLSLIRIATLTEFRRKVQVGFFTRLRPDGTREEIKEQFGQSTLDALEHLREQRVKQLASRIVEGALGVGSESPRHWDGCKRPRRCINDQRFAPCHAVVIEDLTHYRPEETRTRRENRQLMIWSSSKVKKFLSEACQLYGLHLREVSPSYTSRQDSRTGAPGIRCQDVSVCEFMRSPFWRKQVKKAKAKQDKNEGDAREKFLCDVDALWNDKTAADWVKAGFIRVPINGGEIFVSADPNSPAANGLQADLNAAANIGLRALSDPDWPGRWWYVPCERADFRPVKDKVEGSAVVKLNQVLRQPTQGKKDGINKKKKDGDSRVVATNEVVNLWRDISSLPLESAEAGEWKEYAAYTKEVQYRVVNILKKQIQGRCGQPHDRHREDDISF

SEQ ID NO: 1578 - protein, 1558 aa, unidentified
  REGION 1..1558: note = Cas Enzyme sequence
MTKKNKPSVTQRAYTLRLRRAPGECVFCQKNDCHCWNEHLWKTHEAVNKGAKAFGDWLLTLRGGLDHTLADAKVKGGKGKPDRDPTDEERKARRVLLALSWLSVESKLGAPPEFIVASGHDVAKNGNEKVFEALEEILKSRKIAKNEIKEWKDNCSASLGAAIQEDDAVWVNRSKAFDKAKVNDLKGLTRKYAQNAIMHFFGPEHDYFALPGGGNDDDDNDDADSSRLVANEGPEYRTLARQWISTNFGTGKKSNNERIIEILRKLVASDLNRFACHPKSEIIKEMCKIVNCSSPDLDKLCVAIGWITGRKSTGRLAIENLPACPNKTDIEKMKQKLADEADEKDSASGMREVPSWIALLRLSIEQACSIPFVGKRNHIGEFAVMLDHAARRVSIAHSWIKRAEAERRKFEVETKKVNIVPVAAKKWLDLFCMERTVMSGALAQYRIRRRAVNGWKEVVAAWGKSSCINLDDRIAVARALQFDPEIKIDKIGDIQLFEALAEDDAACVWHEEGDATKATAHQPLIDYVIATEAEFKKRHFKVPAYCHPDAFMHPIFCDFGNSRWDIDFSVREAAIYLEKAKTRCTKKQAVVNKVELILRKSSGNIAKEDQLIDKLKTAKRELEDAERELERLNSKHGMTMTLFDGKAVKKTELAWRSKRLAADLALHTDDDSTKLIEVSRANRLGRAASNVTGRDGVKISGLFEQADWNGRLQAPRKQLEAIAKRVADNRWDTKAKKMRDSLQWLVSFSAKLQPNGPWCDFASANNIKLDQKNGEIILASQNSKNDWRGLAYPFWHSSNEEGRKEWPNINLSRLAGLRVLSVDLGHRYAAACAVWEAISTDKVRKACRAAGHEPPKASDLYLHLKQKVKKVEKGGQTEVNKTTIYRRIGADKLPNGMPHSAPWARLDRQFLIRLQGEEQGVREASNKEIWEVHQLEAEIGRTAPIIDQLVKGGWGESEKQKKRLKVLRTLGWKPINKDVGDVSSPSLSIDEMMFFAVRTMRLGLKRHADRARIAFAMTAAYNTMPGGRRYYFNEPKELSANDNKAERDNKRVEFIQDALMLWHSLAFSNGWQDDAASQLWDGLIAKLPGYKIPEEIGEEDSGAERRKKMKENRKNLYDVAVALAKDAKLRKALHEAWKKRWEGDDKQWQKRLRWFKDWILPRGKAAQDSAIRKVGGLSLTRLATLTEFRRKVQVGFFTRLKPDGTSEKNKERFGQRTLDALENMREQRVKQLASRIAESALGIGRMKRFRGEKDVKRPRERVDEPCHAIVIENLTQYRPKETRTRRENCLLMTWSSSKVKKYLTESCQLHGIHLREVSASYTSLQDSRTGSPGIRCQDLSVKEFMRSKYWRKQVEQAEKKPAEGKGDSRMRFLCELNKRWKDKRGEWEKAGVIRIPLKGGEIFVSAESKSPAAMGLQADLNAAANIGLRALTDPDWPGKWWYVPCDRASFKPVREKVDGSAAVNPDKQLRQPAHVHSSDIDKIITKRGRKNVGKANGIVNLWRDISSSSLECVKSGEWKEIAAYQNDVQCRVIRNIKEKKKGRDKQPQKGSKEADIPF

SEQ ID NO: 1579 - protein, 1558 aa, unidentified
  REGION 1..1558: note = Cas Enzyme sequence
MTKKNKPSVTQRAYTLRLRRAPGECVFCQKNDCHCWNEHLWKTHEAVNKGAKAFGDWLLTLRGGLDHTLADAKVKGGKGKPDRDPTDEERKARRVLLALSWLSVESKLGAPPEFIVASGHDVAKNGNEKVFEALEEILKSRKIAKNEIKEWKDNCSASLGAAIQEDDAVWVNRSKAFDKAKVNDLKGLTRKYAQNAIMHFFGPEHDYFALPGGGNDDDDNDDADSSRLVANEGPEYRTLARQWISTNFGTGKKSNNERIIEILRKLVASDLNRFACHPKSEIIKEMCKIVNCSSPDLDKLCVAIGWITGRKSTGRLAIENLPACPNKTDIEKMKQKLADEADEKDSASGMREVPSWIALLRLSIEQACSIPFVGKRNHIGEFAVMLDHAARRVSIAHSWIKRAEAERRKFEVETKKVNIVPVAAKKWLDLFCMERTVMSGALAQYRIRRRAVNGWKEVVAAWGKSSCINLDDRIAVARALQFDPEIKIDKIGDIQLFEALAEDDAACVWHEEGDATKATAHQPLIDYVIATEAEFKKRHFKVPAYCHPDAFMHPIFCDFGNSRWDIDFSVREAAIYLEKAKTRCTKKQAVVNKVELILRKSSGNIAKEDQLIDKLKTAKRELEDAERELERLNSKHGMTMTLFDGKAVKKTELAWRSKRLAADLALHTDDDSTKLIEVSRANRLGRAASNVTGRDGVKISGLFEQADWNGRLQAPRKQLEAIAKRVADNRWDTKAKKMRDSLQWLVSFSAKLQPNGPWCDFASANNIKLDQKNGEIILASQNSKNDWRGLAYPFWHSSNEEGRKGMAKHNLSRLAGLRVLSVDLGHRYAAACAVWEAISTDKVRKACRAAGHEPPKASDLYLHLKQKVKKVEKGGQTEVNKTTIYRRIGADKLPNGMPHSAPWARLDRQFLIRLQGEEQGVREASNKEIWEVHQLEAEIGRTAPIIDQLVKGGWGESEKQKKRLKVLRTLGWKPINKDVGDVSSPSLSIDEMMFFAVRTMRLGLKRHADRARIAFAMTAAYNTMPGGRRYYFNEPKELSANDNKAERDNKRVEFIQDALMLWHSLAFSNGWQDDAASQLWDGLIAKLPGYKIPEEIGEEDSGAERRKKMKENRKNLYDVAVALAKDAKLRKALHEAWKKRWEGDDKQWQKRLRWFKDWILPRGKAAQDSAIRKVGGLSLTRLATLTEFRRKVQVGFFTRLKPDGTSEKNKERFGQRTLDALENMREQRVKQLASRIAESALGIGRMKRFRGEKDVKRPRERVDEPCHAIVIENLTQYRPKETRTRRENCLLMTWSSSKVKKYLTESCQLHGIHLREVSASYTSLQDSRTGSPGIRCQDLSVKEFMRSKYWRKQVEQAEKKPAEGKGDSRMRFLCELNKRWKDKRGEWEKAGVIRIPLKGGEIFVSAESKSPAAMGLQADLNAAANIGLRALTDPDWPGKWWYVPCDRASFKPVREKVDGSAAVNPDKQLRQPAHVHSSDIDKIITKRGRKNVGKANGIVNLWRDISSSSLECVKSGEWKEIAAYQNDVQCRVIRNIKEKKKGRDKQPQKGSKEADIPF

SEQ ID NO: 1580 - protein, 1559 aa, unidentified
  REGION 1..1559: note = Cas Enzyme sequence
MPDAKIKTVFDNFTRKYALSKTLKFELKPVPRTRKLLNLGNKNSKTIFLQDKVRAENYAIIKEYVDKLHANFINKALALSGAYIDVTKIKNEKQEDVSDEQEIDNDGKGKEEKFKSNHHKKIIELFKEIGTKDLYGWIKFDKKNIISGKLFGKELIDILREEFKNELDKEIDIPVLFFNKDEKRKKRKLKDVFSSFGKNEKKEGKNFTTYFTSAFHDNRKNYYKGDGKTGRVATRIVDENLKRFLLNKEKFENILKSADGDSEEIKKIRDKEKSAKLIERYRSLLKSFDDCTIWDDFMTKKAKRAELPKDFDYKNWRDYAFGNKYGHFLQKKINAYNFIKGKLNKDINESKIDIGNFQKLHKQVHGEAKKLDTEEEFYVDKDNIFAAENSFIKRFIVHSQNKLRYSQKIFDRFLKEEYSKPEQVFISKRAVNTISSRCFANWNTLKEAIRDNYNEREKKQNKDLPQFVDLLVIKDVLESEKDTPKDELFKYKYFEAIDPKNKDRKRLQELQINLEDGKHWHNFLLIMKYEFDSLKKRHEQAAVKLLIEKKYDKVNNKQQIGLLFDFAESANGLMSMTKYFALRRKGVMVEDSRYSNRDEIHEMAENYLDGSDDGTEGRCFINEYYKALKHFVSQKPWIEDKVVLTFENPVLLGGWNQTKEMECGGILLERSGCYYLGYLENKKTFDYSFNENDLYSNGKESKKKKAETLEKNWQERLKRFQKARAKNGEEFYNKIEIFQIADAHHDVSLLRSRATKYNLKKFDKFYKDQGGDPNKIDDIKENNSYKTTEKNFNLNDLKTIVDYYKACLPAQDLRRIDEYNDVSNFEKAIEQKGYSNWRFFDFSKLSITDSYKNINGFTNELERCGYRVDTVKISKNYIDEAVKNGDLYLFQIYNKDFELDEEIGKEKHRDKFVSKKEWRQQKDRREEEKEHGRENEHTTFFKMLFDQEKNLRNKDGVIYKLSGGAKLFYRPASKDLKNKEDQYGKKISERQRYSEDKLMLHIPILMNFVNKNEERQINSDINKLIYDTGFKQDKFRIIALDRGEKNLVYLTVLNEQGKILQAESLNHITRFDKNGKPKKEKNQYHDKNGNPKGEAKINDFKDYHNLLEQKQIERLKARKSWEPVEKIANLKEGYLGFVANKIASLVVDFIQDGKIPVIVLENLNVGMKQGRIQIEKQVYSKVEEKIAKKLSYLVDKRVGNFLNAWQLTPNIKTFGSDIEWKDQVGIIFYVNPSYTSATCPKCGFRKRKYIKAEKAKDEFKKVEMSFDGARYIFKFSSEVTDTVYSNVRRVIWDKKANEGRGGSKEIDDVTKEMTKLFKDFGMSINNSISGQIQQLELSKGREKEFWGRLLKWFNYILEIRNSINKKRRISDENAEIEEWGENKDFIFCPHCYFDSEKKEAMNNLKEKIYIGDEAQKFEFNGDANGSYNIGRKGIIGIQKIKAYEQEKIDFQKKWNITDWPKSDKNNDKISLSEGLFLQLVKLKEKGINNKKEAYYYCVLSEGIRLKPNEKTIEYFSVDKRLRKYPDLFISDSEWDKFVQNKQNLKESILPEKQVTYAKK

SEQ ID NO: 1581 - protein, 1562 aa, unidentified
  REGION 1..1562: note = Cas Enzyme sequence
MLYKLNRSQSRGVFSKMNRIYQGRVCGVCSANPDTKASPEQRWLQLSDWDRAMWAHHELFQTAVNYYTLCLAAMAEGMDDPAFAEIAFAVATDTAARNPKHKNEAAREKAVAEAAETAKAMIAAIRAWRDAVEKTWVESERRGKKITGGYAAVAPILGVPVAAKPEGKDAFAACAATALAKSGATKEQRAAALLHLLEEAAKSDLNQLAVGRLPFFCTAKGELGAVSRAQASQQEADRQRLAIQFKEMPDDEAIMRASSLNLGLFLTTPPTEEIVGGEAVKTLRKYWEKTENAYPVLGAASSRLDAIAPKAAKSAVSVSTDAPLRIPAPGRKPSGIYPVAAVFRFVPCAETLIAFRAATASLCKANGKHVVNDPIADSRIEDTPHFAYFTNLAFHREVDAKQRAAWFEFDLAAFVEAVKSPHRYYKDTQARLAAGAGLGHDLVAMEGEGRTAGADEGEGGKHGLDGFAGDVRVDRLLAVLFSDLGHLGEVEFPDDDRLERTFITEAITRLGVELPDNSREYTLRERTLRSWRAVRDAWRDLHEKGSVTEDLLWEIVAKEQGEHRHDFGSARFYEALAEPDNHCIWRDKGTQSFHADDPVSAWAEYTELRRELCDKRRPIHFTPAHPKASPRFFIFPKKAAAGGKWGSTHEVCAGGTATVMDKHGMLAFTAGIAIRDGVKWRPVMTRITYRAPRLRRDGMRSDDEESLESAPWLQPMVKALGLAEPPVQDFGNCRITLQALAFENEDKVEKYNIQLTFPVEIDAEKLITQIGKQALWAKRFNLTPDGDNFRESTLRRKHEKQPKEPPGPLEDLIGHFTFGSVDFGLHADSWAMHEVRLDGKFTNKKGEPVASRAITAGDEPPWRLVTRELCKLRLPGSNATVWRKRGKNERDKKGEFDWREELYGNRGRSAKPEETTDCFQLMCELLGESYAWEFVSHEQELPADVQTRAAGLLGEFSFPQQNDKLIIVIRRAQSRLARIARWRTGIGDDCRREGVLTEIRNACGLDETGGKVKDEKTGKFREAERWIPVAIQNTAKDGDFAALARETVNEHQRLILHLPPRLVRIANRVLPLLGRSWEWARVGDREKEGRLHGLEQSGPKIEGVHLPGQRGLSIWRIEQIEELRRRIQSFNQAERRHHAAEQAIQGHWTADAAKVWVRRDFTDPCDDVLGKLDEIKTQRVNQSAHMILAQALGVRLAKPPGNKKALREECDQHGVYEKFRAPVDFIAIEDLSRYRTTQGRSPHENGRLMKWCHRAVRDKLRELCQPFGIPVLEVPAAYSSQFCARSGVIGFRAAEVTEGFETQAPWRFKLRVKDGEKETIEQQELRQLAVDLYEAQKAMEGWWRAKNGDGTPPKVTLLLPKQGGQIFVPIVDAKANDNRLGAKVCDADLNAAVNIGLRAVADPRMWEFFPRLRTERISGEVRYKGRKGKESFGAVPAGEVRIALRAREKRKYGENGPGLSLGEQPSGSAARETKQPNYFRDFADVGRLLWWLPEPADAETRKLLGFAKQFVPKDKAILPDPAAPSKMVEIVSSKAIFMALKRLQWHRCQEVNSARLARWKPK

SEQ ID NO: 1582 - protein, 1563 aa, unidentified
  REGION 1..1563: note = Cas Enzyme sequence
MSLNRIYQGRVNCVEIKNPDREAAKEKPWLLYHSDLKIADALTTRIPALRTKVEQEIAKRSKLSKAERAQTPKSKELQEYEQLRDKQRKEWQSILQEHHERFQNAVNYYFAVFAAMVSDNCSHKFWREYREVVERNWQKHSGRKGSWLNPFVCVCRAAGLKEDASFKEFRNTVFMLTGSQATESQRFAALTDLFQAVDRVTQTDDDTENALAGEAKNLYGQEFVTLAAQEMDVPSKITKGNQKNQAAVLIGKVRAGENLTWNDVFAFKTHPGKKPWTQDQAIAKLKKAVSDLIDNLEDAIKKKAEAETTARSEKGKTGLAEQKKQIRGLVDSLVAGQTIFEKWLTEKTTILPADEPTRSGRGAEKLKAAMLLALRPDISAFRDAFLYFNQSDKAGVLIEKVCGGANLAWDDVFAFKKHPGKKQWTPDQAKTKLKAAIGDLVRKLEDTEKKLEEVEAKKRIKNLLKNLAEGQKIFEQWLADKATLPADEPTIRTSRGAERLKSAMVFALRPDISGFREAFLYFNPPAEKQTSDPSYEARHAGGIERPVFPQFLDLWCGRQKDKSIGYGVWPHFEKAAFMEAFNKIGQFHLTGQKFDDRLAEANATISATRRELEEEPNSKLHLIKAITEDLAEGIVGEDGQERRYTIRDRTLKNWPKVRARWRELLKENANATPKELVAEKNALQKKLREKFGSAALFEKLAEKNYWSLWNSSEDALERWVKYEDALEERTHLQEGIQFTPAHPEKSPRYFRWSESSNREHLPWQGMTGQNPNNPKPFTVRVDAFDFERKTPIKLLLHFSAPRLLRNELRKKGEKLETENPDVIALPPALRAVVEKLGLRSDKHTFAGTSVRLAPIPDDKQNVQLVFEYGFECKQLETEWRRKFPFDGYSSKDKPDTLIGLRWPRDNAKRLDWQQTGKVQCLAVDLGINNAAAYQVMRAEIVPSQAIETKGLFHDITPANSPERWRVRSIANGLIRLSGEDAWIYRDVRERDRREGSRKLQEAIEQLLPGQSKTFLPELSGSAGRNAQPDEIVEAEGWFKDLEKYGDNFRQRHSKGAAHLSFPHQNDELLFGLSRLRSQLFRLHRWAEHIFGDLPRIANSAKLQKIRERADKRRAEALAQISELEDDDPLKLLKSLTSNHEELRTKLEGLIDDYLAKFKELLPKFADRILPTRKGEWKWDVAEGGWFSMQLDTKKERPEAWLAGQRGLSYERLRQLKELRQFAQSLNHLCRHKFAKRYMAGRREEISEPFEGCRQALEDARNDRVKQIAHAIFAAALGVELDTPPADKKEQKRIKSLHGVYRCLERGPVNFIALEQLKDFRTTDRQSRRENRQLAEWRHREIHRVLKELCQLVGMQIVYVKPTNTSRISGKDHSFGFRAEEVFPDDPRVANWRRIVKKEENKEDIADLDEFLRHLESIPADKSLLRRREGGPVFVSLSGDVSERPNSVLSQADLNGAYRIGLRAISHRNCWLCQGMFYASEKPLPSADSQEDAPLPKEAHGYFIIDRFKKFDKSVTHSGCNYPVIRDYPHLWDLVRGDLAISRCREINIARIAKWERNKDDVPM

SEQ ID NO: 1583 - protein, 1570 aa, unidentified
  REGION 1..1570: note = Cas Enzyme sequence
MMMSQKEKPATTQRAYTLRLRGVNPNDNSWRHALWQTHEAVNKGAKVFGDWLLTLRGGLDHSLVAADNSDRIPTDEERKARRILLALSWLSVESERGAPEKYIVASGKEASTDRDIKVIAALEEILKKRKLSDDEIKGWIDDCKASLSAAIRDDAVWVNRSKAFDDARVGRASFRSHAVWVNRSKAFDDAVNVKRIGDSLTREEVWDMLDYFFVSAEAYLKPIKISGDESTDTEKEEKAKDLVQKAGQWLSGRFGSGKGADFPRMAKVYEKIVQWADQAEADTAGGEAISNLVEALKEFKPASEDLDGVLGLISGRGYKSATRNYLQQIHTKSNITKEDLDNLKKKADEDRKKCLGKSGSKGQRPYADAILDDVERDCVFTYRVAENGEHVSVLDYSKYKEGCKWGTSSHQEFSVMLDHAARRVSLAHTWIKRAEAERRKFEEDAKKKDFVPKSASKWLDQFCEERSEASGALEPYRIRRKALDGWKDVVEAWSDKSCKTNTDRIEAARALQHQIDKFGDIQLFEALAADDARCVWHKDGNETASPDPQPLIDYVLAAEAEFNKQRFKVPAYRHPDALLHPVFCDFGNSRWSIDFSIREATTELNKAKKKLQKTEEAFTKATNVFVTDRENGKKREKLEKAKKELTDARQEVKRLSSARRLSMTLWTGIVLENKFPLCWQSKRLVQDLALSQKEQKCEATEVTRADRFGRAASNVTKSDDVEISGLFEQKDWNGRLQAPRQQLEAIAKVRDNDSLPTEERDRRICKMKDRIRWLVTFSAKLQPMGPWCDFAEKHRELELKIDPQYWPHAEENKKRKGQARLILSRLPGLRVLSVDLGHRYAAACAVWETVDSRQVEDACKDANHERPKSEDLYLHLTKRKNAGNDVEKTIIYRRIGADNLPNGTPHPAPWARLDRQFLIKLQGEEEGARMASDEEIWAVHQMEAAFGRSVLLIDRLVASGWGSSDEQKARLEKLKGLGWTPAKQPSSNYESDLDQGEFFKPSLSIDELMYSAVRMMRLALKRHGDRARIAFAMTAEYKTMPGDRRYYFAESKELSVEDNQEVRDSKRVEFIRDALVLWYDLAYSQGWRDNKARQLWDEYIAKLPEYGAFDEKIEESAAQGDKKRNEEIKEKLNNVPRVLANNESLRKDLHDAWQCRWEEDDDQWKKQLRWFKDWILPRGKAAKDPAIRGVGGLSLTRLATLTEFRRKVQVGFFTRLRPDGTRAETKEGFGQSTLDALENLREQRVKQLTSRIVEAALGVGRVKRPAGGKDPKRPDKRVDEPCHAIIIENLTNYRPEETRTRRENRQLMSWSSSKVQKYLSEACQLHGLHLREVSASYTSRQDSRTGAPGMRCQDVPVAEFMRSPFWRKQVKQAQENVSKNKGNKRERYLCDLNEMWGHKQPADWKEAGDVRIPLNGGEIFVSADSTSPAAKGLQADLNAAANIGLRALIEPDWEGKWWYVPCDAAGLPVKDHVEGSQVSGLNQALRQPEQAQTNEANTETKKRKSGRGKSREVINLWHDISSSELNDREWKDYNAYWNGVQYRVVSNLNQQMNGRNKKRQVDLGDDDVPF

SEQ ID NO: 1584 - protein, 1572 aa, unidentified
  REGION 1..1572: note = Cas Enzyme sequence
MGAIYRSYEVLVEETAANHKTRKAAKTSKEFRLHHQNTCRALKITHELFQDAVCYYILCLIGLVKNERERNGEPINRMWDYLLLEKTDAVLARLVSQYPHAPFHKATSISELLSKTYGWLAAGEDKPTSASLLTTYRILFQQAAKGESDEDQSAALENLKSFAGTWIAILCNENGDTTIPGQGVFDKLHRQFRTDKFSSAGDIWKTVQKLVEEALLQKNEADTIWRQREGAKIKDKNAKAKTQKPDEKIAALCKEQWEEKSKEDRESLKKLFLKAFSGEKTKKYCSFSPEAIASAVEEIQTTTADNPCFVRLRFGARDNSMEQPLFRYFWFRQDPKFGEVATKDLLEYVAEENPEAEILDDGGISIRKMPYQRTGKEPLFPYFTNCLGIKHKERAAWFDFDKSAFKRAAEEVFKYKLRTDEREKLKAERKQKVDALKLEIQGDPREALIEKLLAKLGGAIGYGMRRATIGGWADLRQDFLKIAKRDGEQIDEDKLLAAIETAREGSGGGFGSGALFKELCEEEFHPLWLDKWSDMQPHHPKNFVRWWVLYSEAKEELEKIWDKENGQAKPIAFTWPSTKNRHRKTSFRPLDFDLQVEPTPKLDLFDREAEGQEIKLVQTNAAPPKKKKAEKGESDTAVKLTDDADNPLYPLTISYRRFKRDRIANADGNSVEAEFAPPLVAIDGKEKPSFHKPGNKKPLESSASLLPADKDGCWHFMFSFKLEQEMQKKLTGDAVKIAGEKSVRIVKKSGKWIGLNFRWPIDAKTEKKKTEEVVPTIGNEIEETDAKFNPKKIWCADKFEPFHILSVDLGVRYAGAWCRALVKIGRDSDRPNQRTISSAEHPQEIVFDARDFGTFRLQGEDAKIWRKDKHKGFSDAPELEKCGSRGRIASEIERAEFAQLAGTIFAATKRFPIPDDPSELKFFPDLGGHLVYRMSRLLGRVRFLFKLRWQISGTKKKVGHEYKVLAGDEQKEFRGEQHFNAIVSLAFIPKEDKPDETEENFMRELRLSLSPDEIWSMQTYKHDGESYPLFSKVKGGHSKEDKDKAKKRKAAQKAAQSDLKKELASNNTSKWNWSALAKAADNELQNIMRTFVSENSLIGQVAHFVWPLENKRWKWNNCTHDKEGNIVQSFLERDENSSTPKRFIHGMRGLNMKRICLMQDFRQCCQSLAKLERRFYTEKDNGLEPSPVKLGDRNHEPSQAFIDKINELRDQRVNQTAHMILAEALGLELMNPAEVSIDGKSKWELKSERDLHGRYKQKKPRVAVIVLEDLSRYRTSQDRSRYENSQLMEWSHRAIIGKLQDMAQIFRIQIITVDARFSSRFCSRTGVPGVRCAQVAQGFEKEYPWKKWKDEKDSKQQPTERAKMIGLAAEKLNLCNNPKVTLILPMDGGPAFFPVLPHAPNKEGLEANADIGAAVNIGLRPMAHPDRLDIFPVLRTEAKGDGKLEIKNWRGSLNGTAVQTVETPARKKVDEENEVSAEDDKGGDEELESGKHPRLFAAVEVGGNFSVPVENKCRYELPMTFDGRKVTSGGVSAAKGKDYWHRVKTLCWERIRKINAQRLRALKIEPPDEWKS

SEQ ID NO: 1585 - protein, 1577 aa, unidentified
  REGION 1..1577: note = Cas Enzyme sequence
MSAIYRSYEVLVEETASNHKTRGVGKTKKEFKPHFENTCRALRVTHELFQDAVCYYILCLVGLVKDECEKNSEPINRMGNFLSGNPGTATILARLSSRYPSAPFHKASNLHQFLALTYGWKLAESIKPTPDSLLLTYRLLFQQAVKASDNEDQSSALENLKTFAGNWIAILCNEDGDTTIPGQGVFDKLHRQLAKIADPKTEAVWKIVDSIAKEALQTKATMDADWKQRESVKLIARNAKAKRPKPAAEITTLFAATFDEKIEGDREGLKNLFLKAFSPAKTKKYCSLSPDVIESAIQDIQATANDDKRFLRLRYAARDNSMEQPLFRFLWLWEHTKHGEAVTKDLLEYVSKEEPETELRDDDNRAVSKMPYQQTGKEPLFPYFTNCLGIAHSERAAWFEFDKSAFKRAAEEVFKYKIRSDARETLINERKQTLDVLKAEINGDLRAGLMETLLAELGGAIGYGMRRATIGGWADLRQEFLKIAKKGEPIDEDELLAAIEKARDASGGGFGSGAFFKALCAEEYHPLWLPLNNPQSHHPKNFVRWWVIYSEAKEELKKVWDEDAKPPMPKPIAFTWPSTENRHGETSFRPLDFDIPVTPTPGVDLFDREGDGKPIKLVRANAKPPKQSKSSKAKSVEPPPFTDADGNALYPLTLSYRRFKRDRIANADGSSVEAEYAPPLVAGKAPAFHEPGNKEPLDSSASLLPANKQGCWHFMFSFKLERNMQKLLVDDAAKIPGEKSVRVVKKSGQWVGLNLRWPIDLKTESPKKKDEAAAISADGEEIEEADAKFSVKKIWCSGEFKPFDILSVDLGVRYVGAWCRGRVKIGRDAGRPTERVISPAGHGQEIAYDAYDFGTFRLQGEDAKIWRKDKHKGFADEPELEKCGSRGRIASEIERAEFAGLAERIFPATKRFPIPDEPAELKFFPDLADDLTYRLRRRLGRIRFLFKLRWQISGKKKKIGHEYKDLVGDELKVFRGEQRFNAIAGLTFIPKENEPEETEDDFMCNLRLKLAPDELWSKLVYEHNGETWPLFAKVKGGHAKDDKEKSKQKKSAQKAAWAKLKIELQSDSSNKWDWTALGKAVETELKKAMQAFAGNQSLVAEVARFVWPLQDKKWKWNCCTINKQGKIDQSFLERDENSNEPKRFIHGMRGLSMKRIRLMQDFRQCCQSLAKLERRFYTDDNHGLEPSPVRPGDRVHEPALAFLEKINELREQRVNQTAHMILAEALGLELMNPAKVEIDGKSKWQLKSERDLHGRYKQKKQRVAAIVLEDLSRYRTSQDRSRYENGQLMEWSHRAVIGKLQDMAQVFGIQIITVDARFSSRFCSRTGVPGIRCAQVSKGFENEYPWKKWAEEKDKRADLIHSVVESLNKCDDPKFTLVLPMDGGPAFFPVVPHTAGKEGLEANADINAAVNIGLRAIGHPDRLDIFPVLRTEAKADDKLEIRNRRGSLSEGATKNAEDRTVKIVESEAENGTKEKQPLHAEDENVGDEELETGKFPYLYAAVRVGNNLSVPISGKKRYQLPISLDGQKVACDEKSSVGTACGKDYWPLVKQLCWQRIEEINRHRIEKRKPEEDDIPM

SEQ ID NO: 1586 - protein, 1577 aa, unidentified
  REGION 1..1577: note = Cas Enzyme sequence
RRQVERICNNNWPIAARAGKRHGRDLRISRREEMADENGREQPVVTTQRAYTLRLSGTDKNDNSWRDRLWKTHEAVNKGAKVFGDWLLTMRGGLCHTLAEADIPGKGKKPALRPTPQEIKNRRIVLALSWLSVESKCGAPESYIVPHDSNTATGERKYWKTVEALREILRSRGLTEERADEWADDCRDSLSATIREDAVWVNRSRVFDLAATKIGASLTREELWDFLQPFFANKHSYLEMDTVASATNGDSGTDTEESKVDSSDEKAKDLSQKAGQWLSSRFGTGTGADFSRFSKVYEVLAAGCQSIAAGVSGAEAINRLATAMEEYSPHSKDIEGILGLISGPGYKSATRNNVLPQINSLQRVSQQDLDRLRDACEKDAVQSRQRVGGKGSRPYANAILRDVEVACGICYAKTAGGPSRHWQYAVILDHAARRVSMAHSWIKRAEEQRSKFEIERNKLDHVPHDARAWLDAFCNRRSSESGATDAYRIRRSAVGGWKQVVAEWAALPATAENAGSELLSGPELARIRAARELQDTVEKFGDIQLFEALSATDARCVWQPDGKSDAQPLLDYVAGTDAISKRQRFKVPAYRHPDALLHPIFCDFGNSRWSIDYAIHRAPKELTHAKQLLEKKKAEIDKAELTLAKANGTAKRADISEKIKSLRAAFIQQQSKVACLDSRHAMTMGLWDGSRIEDTPLRWQSKRFASDIGQPLSAHSLPVSRADRFGRASVAAEDNSPVKPSGLFDLPDWNGRLQAPRRQLEAIAAMRDSAKLSAGEKQHLVAKRIHSIRWLVTLSAKLQALGPWFEFAGPRGLLEYRNGEVVLSPRSSKDSWRGLAFPFWHPHNLKGRGGAVRHVLSRLPGLRVLSVDLGHRYAAACAVWETVSTGQIQKACLDAGMEAPGPHPLYLHLKQIVDGKEKKTIYRRIGADTLPDGSPHPAPWARLDRQFLIKLQGENRDARPATSEEVAAVEQMENELGVVRQLKRKGQELLVDELVFDTLRTLRLGLRRHGTRARIAFNLTATKRIRPGGIQEVLDQEGRLSLLKETLLLWYEVYSGERWRDKPAEDLWNRHIQPLLGGTILQDTVNQEDIPSAAKRRKQREETSEKLRPVAEQIAKNDSLCRQLRVLWSAQWQTEDAIWRTRLRWMRRWLLPRGIKRDAQLRKSIRDVGGLSLTRIASFKLLYQVQKAYRMRPHPEDPERNIPKRGDSSLEDFDQRVLDAMERMRENRVKQLASRIAEAALGIGDEAGIHSKDGRQKKRPTERSRDSRFASCHAVVIEDLTHYRPDETRTRRENRQLMSWSSSKVKKYLGEACQLHGLHLREVSPAYTSRQDSRTGAPGLRCNDVTVEEFKKSLFWRKQVGAAEKNREAGNKGDARERYLLWVDEKISADETKETDSFLIPSDGGEMFVSAFEDNKTQSASRRKKPSALQADLNAAANIGLRALLDPDWEGRWWYIPCDAATFCPDTKKFIGCKAVDPSKPLRVVAEEGAISASGIGSKKSGRKRNAAIDGTRIVNLWRDPSSMPVHLDASGSGEWQRYHEYKNNVQSRVIQNLKARYKQTWQQENAFVPQNEDTPF

SEQ ID NO: 1587 - protein, 1579 aa, unidentified
  REGION 1..1579: note = Cas Enzyme sequence
MASIYRSYEVLVEETAENHKTRGAGKTKKNFKPYHENTCRALRVTHELFQDAVCYYLLCLVGLVKNERDKDGEPINRMWEYLHSDSMRGATHQIAAHLGKTYFKQSGLGVNPTYKILEFIYPNIPAKKLAAETVALKSVYQQLASAAVQFKKQGKGKNAKEKASLADMAKFASNWYQRLANPASTQGGREIESRNNTYWLNVAAELKSAVEPKLSADFDDAAYAKQLDLTYCFNSPVTELSSEDALKDYGLAFGLQESSEPKSFWGKPPETVIAALARYATSSDPKLPSVKFENEVSALRKFARDKTQQAKFDYPAVASGFKPSGTYWLCLRYKFSPSPHTRRQLFENIKKRKETDSSDPLAEVRSEFGYVFPFFTNLLGLSPKSGDGAVWTGFDKSAFKRAAEEVFKYRLRSDERIEQIRKRSAKIEALNGTGEWQDDKGKTKQLCGIKDDAQRPLLMRQLLDKLGGAIGYGMRRATIGGWADLRKDFLRIAKKGEPIDEDELLTKIEKAREESGGGFGNGAFFKALCEEEYHPLWLPEWENKLSHHPHNFVRWWVLYSEAKEELKKAWDEESNQPKPIAFTWPSTKNRHKEISFRPLDFDISVTPTPSIYLFDQEGDKKPIKLVPTNAKPPKRQKSAKTESADAQMFTDSDGNALYPLTLSYRRFKRDRIANAEGNSVEAEYATPLIVGESPKFTRNEKDKGKPLDASASLLPADKQGCWHFMFSFKLDQKMQKKLKDEIAKIPGEKSIRKNRKWVGLYFRWPIDAKTEKPPKQKQAEAVPDASDEAKEPDANFSVKKIWCSENFKPFDILSVDLGVRYAGAWCRGRVKIDRDADRPNQRTISPADHAQEIVFDAYDFGTFRLQGEDAEIWLKDKHKGFGSKPEPEKCGSRGRIASEDEKAEFTNLAGLVFSPTVRLPIPSEPDELKFFPDLGNHLVYRLSRRLRQIRFLFKLRWQINGCKKKVGNEYKTLDGEDLKIFRGEQRLNVIASLAFVPKDGEPEEGEEAFLRKLRLALAPADVWSSLVYEHNGNKYPIFLKVKGGHSKEEKEKSKKLKSAQKAAKDELRQELTSGGDGKWNWDALAKTAEAELQRTMKVFAGEQSLIAEVARFVWPLQDKKWKWNNCTITKDGKVSQSFLERDGNSSEPKRFIHGMRGLNMKRIRLLQDFRQCCQSLAKLERRFYTEDNYGLEPSPVQAGDRNHEPAQAFHDKINELRDQRVNQTAHMILAEALGLELMNPAEVTIDGKSKWELKSERDLHGRYKQKKPRVAAIVLEDLSRYRTSQDRSRYENSQLMEWSHGHVFGKLQDMAQVFGIQIITVDARFSSRFCSRTGVPGIRCAQVAKGFENEYPWKNWKEEKDTERAKMIALVAEKLNLCNNPKATLVLPMDGGPAFLPVISHDPNKEGLQENADIGAAVNIGLRAVAHPDRLDVFPVLRTESKADGKLEIKNRRGSLCEAVTKPEDRTVQTIEPIAKKKAEEKVSASTEDDGGGDEELESGKFPYLYTAVRVGNKLSVPIDDKNRYQLPLNALGQKIVTGDRGSVAAAQGRIYWSLVKQDCCKRIQDINTARLRKMNNEY

SEQ ID NO: 1588 - protein, 1584 aa, unidentified
  REGION 1..1584: note = Cas Enzyme sequence
MASIYRSYEVLVEETAGNHKTRGAGKTRKDFKAHHENTCRALRVTHELFQDAVCYYILCLVGLVKNERDKDGEPINRMWQYLQIDPKTNVVIARLASRYPDAPFHEAGNIQGLLSQTYEWLADESEKTTPASLLTTYRILFQQAAKADSDEDASAALENLKTFAGNWIAILCNENGDTTIPGQGVFDKLHRELSGVAGKEPGRMWKTIEALAQESLCDKSKADAGWQLRETAKANAKNAKAKKPKTGEELARLSRENLDEKLQSDRAALKALFVKAFSASKIKKYCSLKPEEIQAAITEIESATFDDKRFLRLRFGARDNNMEQPLFRYLWLREDAKCGGAVTNDLLEYVAKETPETELRDDDGKGISKMPYQKTGKEPLFPYFTNCLGIKHTDRAAWFEFDKSAFKRAAEEVFKYKLRTDERAELNTERKHKLDTLQAEIKDDPRAPLMEHLLAGLGGAIGYGMRRATIGGWADLRKDFLRIAKKGEPIDEDELLAAIEKAREESSGGFGSGALFKALCDEKYQPLWLPEWENKQPHHPKNFVRWWVLYSEAKEELKKVWDEDTTQPKPIAFTWPGTENRHSETSFRPLDFDIDITPTPPIYLFDQGSEGKPIILIQTNAKPPKKRQSAEVQPADVPAFTDGDGNALYPLTLSYRRFKRDRIANADGSSVEAEFATPLIVGEFPKFPRKEKDKGKPLDSSASLLPADKRGCWHFMFSFKLERGMQKKLVDETVQIPGEKSVRKNRKWVGLYLRWPIDATTEKPPKKKHVQAVPDASDVTKEPDANFSVKKIWCSVDFKPFDILSVDLGVRYAGAWCRGRVKVGRDADRPGQRTISPAGHAHEIVFDAYDFGTFRLQGEDAKIWRKDKHKGFGSEPELEKCGSRGRITSETERQEFAKLAGQLFAPTAWLPIPSEPDELKFFPDLGGHLAYRLRRRLGRVRFLFKLHWQINGKIKKVGHDYIALDGDDLKTFRCEQRSNVLASLAYIPKEDMPEDSDEGEDDFMRELRLTLAPDDVWAALTYEHDGKTYPLFSKIKGGRTKEEKEKSKGQKAVQKAAGAALKKELASDGVGKWNWQALAKAADTELVHTMRAFAGENSLIAEVARFVWPLQNKKWKWNNCTIAKDGKLVQSLLERDDESSEPKRFIHGMRGLNMKRIRLMQDFRQCCQSLAKLERRFTEENHGLEPSPVRPGDRVHEPAPAFLDKINELRDQRVNQTAHMILAEALGLELMNPTEVMIDGKSKWVLKSERDLHGRYKQKKARVAAIVLEDLSRYRTSQDRSRYENSQLMEWSHRAIIGKLQDMAQVFGIQIITVDARFSSRFCSRTGVPGIRCAQVAKGFDNDYPWKKWKEETFGKADKDGKRQLTERANMIVLAAKALNLSDNLKATLILPMDGGPAFLPVISHSPTKEGLQENADIGAAVNIGLRPVAHPDRLDVFPVLRTEAKADGKLEIKNRRGSLSEAASKAEDRTVQTIEPPAEKKAASAEDDIGGDEELESGKFPYLYAAVRVGNNLSVPIADQHRYQLPLAADGRKLVAGDTVGVGAAQSKDFWPRVKRDCWERIKRINATRLRNLGIEPPKEWNI

SEQ ID NO: 1589 - protein, 1586 aa, unidentified
  REGION 1..1586: note = Cas Enzyme sequence
MNTVYRTYEILIEETLSTSDPKRQKSSKPSRENLKTRRAFETTHRVFQDAVCYYMLCLIGLVRNATETGSDGTVTDINPLWRTLTTGEQGKKTNELVCQLRVRYPNAAWSSSSNLTEFRTRVYDWKKNNLELENASLEQTYRILFSQAVGSKSGDDFAEALENLKSFAGTWIAILCNENGNTTIPGGGVYDVVHRRLKSCLNNDSHILKNVVTDAVVKALEERTASVEQWHTSRLERSNRENETAKGKKSPEKIRALIDKAVAGKIQKEAITLRDAYLKSLSPEKTTKYCSLSPEQIQRAIALLGTKQVSVDSFPRLRFEARDNSFEQPLLRYLLLRSEESCSEAVTRDVWDYVRKEDPEHAILDEVKHPLTCMPYQSVGNEPLFPYFTNCLGVSCKDRSVWWDFDKSAFKRAAEEVFKYRIRSDKRLADYRSKANRVLAMQGKGEWADLRGATKQLGGLLEDPRGPLMEQLLAEIGGSIGYGLRRGTIGGWGDLREDFLKAAKIGDPDGESLEVLVTTAQSDSGGGFGSAALFKKLCEPEYFSLWQENWSPWQPWHPKNFLSWYVRYAEAVEELKALAEDDIGSASSVKTSLRLKPISVTLPGTKNKHGEVSFRPFDFYCPIEQHPNIDLFDRDETKQYRLVRTNTTSVKEKIKDSGPEGADYPLTLSYRRLKRDRITLADGSSMEAFYQPPLVVEGAPDFHQEAKAKAMKGNKPYLAVSVEVSSTLLPPTRESGPFHLTMAMLVDIDGLSAATPKIDDKKHPDPAKRTENSVRFGPPLNGKYTHQYLRWPIDAVTEKKTTDASEAHTTDEAEGEKPTKFSAGKLWCVKNFDSFHILSVDLGVRFAGAWCRAKVFKGEPQAGQRIISAETDQAKTGKVVFGVEDVGTFRLQGEDVKLWRKRKGQAHHTFEQEPCGSRGRKATEAEIATFVHLAKQLVPATSRSPLLDAAETKYYPQLASHLQFRLARRLGQLRMLFNLRWRAVGRWKKDGHVYRELSGTELEAFQLEQRLRTIDMLDFSQREDIPDDQEEEHMEKLRLSVVDRSEWEKLTFALKGKTARTFGKQRTKAGKEAQAIARNAFRRKLTDTSSPWDWNALEREATRQIEEAMTSFSGTGGLISRVAHFVWPLIKKRWNWQPCGKEKGGKQSVLECVADETAEDQNITGMRGLNMRRVELLQEFRRCCQSLAKLERRRYQDSNGGLEPSPVRERDEVHEPAPAWIDKVNELREQRVNQTAHLILAEALGVDLMNPDEVEIDGLKKAVLKTERDVHGRYKKNPNRPRVAAIVLEDLSRYRTSQDRSRFENRQLMEWSHRQVLTKLQDMSQVFGIPIFTVDARFSSRFSSRTGVPGIRCVEVSKGFEAEHPWKKWAKETVIKPNGGGERMPSERAKLIETAATQLTTADSRASLILPLDGGPSFLPVQSHHEGHEGLEANADINAAVSIGLRAVAHPDRLDVFPLLKAIPKTNGGMEIVAKRGSFAAKSRVLTPAALPVVAAMQEGATEMPSTDDDEAESGKIKYVFACPKIHVEPAFNIPNEKRYELLGTASGAVSKIYWSRVKETCLSRITNINAARLAKWRDCKDEIPM

SEQ ID NO: 1590 - protein, 1587 aa, unidentified
  REGION 1..1587: note = Cas Enzyme sequence
MSAIYRSYEVLVEETASNHKTRGVGKTKKEFKPHFENTCRALKVTHELFQDAVCYYILCLVGLVKNGCDKGEPINRMWENLHSDSMSAATNEIAAQLAKKYFNQPNLGANASDKLLEFIYGSNPANTKNLAHEVAALKSVYLQLASASYQIKKQGKGENAKTKAALADMAKFASNWYQRLANPYSTQGGQEIESRNNAYWLGIAAELKPTIEPELQSNFDDTTFAKRLELKYCFNSRVTNLSIEDSLKDYGSAFGVIEPNESKSKSFWNKPPKTVVAALKRYASPTDPNEPKVTFDIEVSSLRKCAQDNQQRANFNYPAVTSGSKPSGTYWLCLRYKFSPSSQTRRQLFENIKKRKETDAADPLAAVRADFRLVFQFFTNLLGLAPKPGDGAVWTGFDKSAFKRAAEEVFKYRLRSDERADQIRKRRTKIEALDGDGEWKDDKGKAKHLGGIEGDEERPRLMRQLLDKLGGAIGYGMRRATIGGWADLRQEFLKIANKGEPIDEDDLLAAIEKARDASGGGFGSGAFFKALCEEEYHPLWLPLKNPQSHHPKNFVRWWVLYCEAKEELAKVWDDEKNSPKPIAFTWPSTKNRHGETSFRPLDFDIPVTPTPDVDLFDREGDGKPIKLVRANAKPPKQSKSGKAKSVEPPPFTDADGNALYPLTLSYRRFKRDRIANADGSSVEAEYAPPLVAGKAPAFHETGNKAPLDSSASLLPANKHGCWHFMFSFKLEQDMQKLLDDDAAKIPGKKSVRVVKKSGKWVGLNLRWPIDLKTESPKKRDEAAAILADGDEIEEADAKFSVKNIWCSSEFKPFDILSVDLGVRYAGAWCRGRVKTGHDTIRPNEREISPYGHNPKLFFDAYDFGTFRLQGEDAKIWRKDKHKGFADEPELEKCGSRGRIASEIERAEFAGLAERIFPATKRFPIPTDPAELKFFPDLADHLTYRLRRRLGRIRFLFKLRWQISGKKKKIGHEYKDLVGDELKVFRGEQRFNAIAGLTFIPKENEPEETEDDFMCNLRLKLAPDELWSKLVYEHNGETWPLFAKVKGGHAKDDKEKSKQKKSAQKAAWAKLKIELQSDSSNKWDWTALGKAVETELKKAMQAFAGNQSLVAEVARFVWPLQDKKWKWNCCTINKQGKIDQSFLERDENSNEPKRFIHGMRGLSMKRIRLMQDFRQCCQSLAKLERRFYTDDNHGLEPSPVRPGDRVHEPALAFLEKINELREQRVNQTAHMILAEALGLELMNPAKVEIDGKSKWQLKSERDLHGRYKQKKQRVAAIVLEDLSRYRTSQDRSRYENSQLMEWSHRAVIGKLQDMAQVFGIQIITVDARFSSRFCSRTGVPGIRCAQVSKGFENEYPWKKWAEEKDKRADLIHSVVESLNKCDDPKFTLVLPMDGGPAFFPVVPHTAGKEGLEANADINAAVNIGLRAIGHPDRLDIFPVLRTEAKADDKMEIRNRRGSLSEGATKNAEDRTVKIVESEAENGTKEKQPLHAEDENVGDEELETGKFPYLYAAVRVGNNLSVPISGKKRYQLPISLDGQKVACDEKSSVGTACGKDYWPLVKQLCWQRIEEINRHRIEKRKPEEDDIPM

SEQ ID NO: 1591 - protein, 1594 aa, unidentified
  REGION 1..1594: note = Cas Enzyme sequence
MSTVYRTYEVLIEETLSASDPKRQKSAKPPRENAATRRALEMTHRIFQDAVCYYILCLIGLVRDAKESAPDGSEIEVNPLWHTLTTGAQGGRTDELVRALAKRYPDAPWHDSQGFSSFHSAVYDWKRLGLNTGPAQLALTYKLLFSQAVGENIDDNAAAALENLKSFAGTWIAILCNEDGDTTVPGGGVYDTVHRHLKSCPNADAQRLEQVIGKSIEQSLRQRLIDLREWKTARVHRLTQDNLQSKRKKNSEQIQASAEALVEGKSKKECLTLREAYLKALSPDKTRKYCSLSADQIQAALRLAHAMPLTIESFPRLRFGTRDNSFEQPLFRYLLLKNVDDCSEAVVRDLWNYIRNEKPEAALQDEEGRPLQILPYQATGKEPLFPYFTNCLGISVVDRSVWFDFDKSAFKRAAEEVFKYRIRSDKRRTDYAAKAARVRALEGTGDWQDSKGLPKQLGGMRDDPRWKKMEQLLAEIGGGIGYGLRRSTIGGWGDLREEFLKSAEAGEPDGVELEILVVAAQASSSGGFGSAAFFKKLGEPEYFVLWQEDWAPKQPWHAKNFVAWYVRYAEAKDELKILSEEGADTPENSEATTGTAAAPRLKPISITLPGTTNRYGDESFRPLDFECKIEPHPHLDLFDRDEAGQYRLVRTNTFLAKDKFKDGGPEGAEYPLTLSYRRFKRDRIVSGDGLSMEAFYQPPLVIEGAPDFHQETREKALKSKKAYAPAALTVSASLLPPTRESGPYHLTMAMPVDVDGLTAATRKIDDKKHLDPAKRSENSIRFGPPLNGEFTRMYFRWPVDAEAEKRRPPGASAEGLEESSKPAKISPAKIWCAKDFDPFHILSVDLGVRYAGAWCRAKVFKGEAAPRQRVISAEADEARTGKIVFGVEQVGTFRLQGEDAKHWRKRKGQERHSFEQEPFGSQGRKATEDEVKAFVELAKDIVPESPCNPLPPADETQYFHQLAGHLQFRLARRLGQLRLLFNLRWRATGRVKKDGHIYRELNGEELDAFRLDQRLRVIEMLDFKPRTDVADDREESHMEKLRLILADAAAWDGLVFVFKEQPVRLFAKQRTKSGNAAQEAARNTLKSQFVQSASTWHWEALTEEVTRQIDATMATLTGDSGLVARAAHFVWPLIEKRWVWRPCERSDSGSQSLLVCVADSAAVAQNITGMRGLNMRRIELFQEFRRCCQSLAKLERRYYREAHKGLEPSPVRADDVIHEPAPAWIEKVNELRTQRVNQTANLILAEALGLDLMNPDEVSIDGLKKAALKNERDVHGRYVKNPDKPRVAAIVLEDLSRYRTSQDRSRFENRQLMEWSHRQVLTKLIDMAWKVFGIPVFTVDARFSSRFSSRTGAPGIRCAEVAQGFEHEHPWKKWAEETVLDPKSKDGTRAPSERANLIRETAARLAVAPRKISLLLPLDGGSSFLPVVPHLPDHEGLEPNADINAAANIGLRAVAHPDRFDIFPLLRGKAKPDDALEILAKRGQYAIEVQTLMPVQPAGDRRAASHDPNGSDVEEEDVESGRIKYLFACPNVGNAPALRIDAQNRYELTPGTSAAVSKIYWSRVKQVCLARIEAINAARLAKWRDGQGEKDVRY

SEQ ID NO: 1592 - protein, 1599 aa, unidentified
  REGION 1..1599: note = Cas Enzyme sequence
MAAIYRSYEVLVEETAGNHKSRQNGKTRKELRANCDNTRRALKVTHELFQDAVCYYIFCLAGLVKDARDQNGEPINRMWEYLHSESMLSTTNRIAAHLGKKYFKQPDLGANPTEKLLESIYASTPTKRLAHDTAALNGLYRKLAGEAVQIKKQGKGKNAKTKAALTDMAQFASNWYQRLSNPASTQGGEEVISQNNAYWLKVAAELTPVAEQELRSDFDDAAYAKRLELKYCFNSPVTELSSEDALKDYGLAFGVTEPGKPNSFWNKPLKTAVAALTRYASPRDPSVPKVTFEDAVAKLRECAQDRQLSSTFAYPAVASGSKPSGTYWLCLRYKFSPSPQTRRHLYENIQKRKPTDPTNPLAAIRAEFGLVFPFFTNLLGLSPKSGEGAVWTGFDKSAFKRAAEEVFKYRLRSDERAEQVRKRRAKIAALNERGEWIDEKGKTKQLGGIEGDEERPRLMRQLLDRLGGAIGYGMRRATIGGWADLRQDFLKIAKKGEPIDEDELLAAIEKAREESSGGFGSGAFFKALCDEDYHLLWLTKWDNPQAHHPKNFVRWWVLYSEANEELTKVWDDQKNAPKPIAFTWPSSENRRGDTSFRPLDFEIPVAPAPSIDLFDREDDGKPIKLVRTNAEPPKKKAKEDSAEPPPFMDGDGNALYPLTLSYRRFKRDRIAKADGSSVEAVYAPPLVALNPPSFQETGNKKPLLASASLLPGDKHGCWHFMFSFALEREMQQALVDESARIPGEKDGSVRKIKKNGKWIGLYLRWPVDAKTEKKKDAAAPVETEEVEATDAKFSPTKLWCSSKFEPFDILSVDLGVRYAGAWCRAHIKVGHDPDRPNQRTISPAGSAPEIVFDAYDFGTFRLQGEDAKIWRKDKHKGFGNEPEQEKCGSLGRIASDPERTEFAKLAAQVFPVTTRLPVPNDPAELKFFPDLGDHLVFRLRRRLGRIRFLFKLRWQISGKVKKLVHDYNVLDGAELKEFRGEQRFNVLKSLAYVPKEDMPEDEEGEDDFMRGLRLTLAPDDVWLTLSYEHAGKPYPLFSKVKAGHTPSEKENAKTQKAAQKAAWAALKRELESDCNAKWNWSALAKQTETELQDAMRLFSGEQSVIAEVARFVWPLQDKKWKWISCTINKDGKIEQSYVERDELSNEPKRPIHGMRGLSMKRIRSMQDFRQCCQSLAKLERRFYTEEQHGLEPSPVRSGDRIHEPARPFRDKINELRDQRVNQTAHMILAEALGLELMKPTEVTIDGKSKWELKSERDLHGRYEKKKSRAAAIVLEDLSRYRTSQDRSRYENSQLMEWSHRAVIGKLQDMAQVFGVQIITVDARFSSRFCSRTGVPGIRCAQISKEFENEYPWKKWKEETIGKPDKDGKRKPTERADMILLAAKALNLADNPKATLVLPMDGGPAFLPVITRNSNKDGIQENADIGAAVNIGLRAVAHPDRLDVFPVLRTEAKADGRLEIKNRRGSLSEAVAKAEERTVQLVEPPEKKSKAEDQGATGAEDDSGGDEELESGKFPYLYAAVSVGKTLSVPIADGKRYQLPLTADGRKIATGDGDWAGAAQGKDFWTLVKQDCWTRIKQINARRLEALGIAPPDEEDNIPY

SEQ ID NO: 1593 - protein, 1602 aa, unidentified
  REGION 1..1602: note = Cas Enzyme sequence
MAKKSAPSAVTSAAGSPEPATTQRAYTLRLRGVDPGDTAWRDALWATHEAINKGAKAFGDWLLTLRGGLDHALADAKVIEGTGTKKSNRDPNHEERRDRRILLALSWLSVESAPLCDDPRTPYLVVCGKDVRTTAESGLANRELTLREALRAILRKRGVDDTEIGDPRLEPEDPKNKNTWLSDCGPSLAARFRDDAVWVNRSMMFDSATTDWNTQAARKDAHTLLSFILSADFLVLPTAKKTSKDGDGADESGEQEERQKAVKASSKGAGQRTRHPFSHLLGAGNPFGKPTRALELRGNWRGHLESQLSSTNIPLPSVETSKTKKKDDGPAHTELLREMFSKAASRVAQIVTKQRQQEADRLARKDADKELSAMEIDASYKSAITALATYCEEYRVTSGATGEFRIRPGQITGWPGIVKRWSAIKTSDANAAWEARIQAAKDAIEADEEKKPGDINLFSRLAEERFSDVWRRDGKTYDATILQRFVKGMKARSDSERLKVAAYRHPDPYRNPIFCQFGVSRPTIQFRRIRAFTKDATGNDPRAVGMLLWHPKANSAKLTVMHGVSRRLDNEIGSACDAVQLNPETVPGVSRRGRLGAAAAGLQSSDSPSRVSGVFDLKEVKSRPADDDDEGESSDRKLKEPKWNGTLSANRRDLASIQRLRDDAAKELNGATKRELLAKVEHRRGQLRWTLTVSIEMEGRGPWLRYVIKAPDQTPFKRTTKKDQPNDRNDHTKGLKRKKGGILIDAQGWPWDEFNKPLKDSKDGSALEVDKKATRGDRACLILSRLPGLRTLSVDLGHRFAAGCAVWEALTLADFKKEIAGRAVVGGGTGKHHLFVHTRHADPKTGKDRTTVYRRVGPDKLPNGSEHPAPWARLDRQFLIKLQGEEKPARAATNGTMKDGSPTAINEVGLVADLAKGLGLLRGNADERTGRGVDELMRRAVGVATLGLKRHARRAKIAYALSPECNGIPGMGDSLKIITRGDEEHARFLTGALADWHALATDTDWDGSHARELWNTHVKPLTHGFPIGTPAQPDPNAEAPTRQQRRKATDAFRDEKIKPIAEHLAKLPASATKSMHDAWAKRWKSDDGLERTKDDFAHTPVKNSTGKIVGSTTAPKKGKESAKGMGGWHARLRLLTDWLMGRHLPGQESKRWNRNVGGLSLTRISTLRSLYQLHKAFAMRPTPDKVQGAPKFGESNTGIAQGILDTMERMREQRVKQLASRIAEAALGIGRIPSEQLAAGAARPTFQKDKPCHAVVIESLRNYRPDELQTRRENKALMEWSSGKVRKYLEEACQLHGLHLREVQPNYTSRQCSRTGLPGIRCVDVPVDPKTGEVKAYWWKKTLASARKKIAEGKRDSEARFLIALADHLAELKAKGKRLPQTVRVPRKGGDLFLAAPPDEAHGLANRATSKALQADLNAAANIGLRALLDPDFPGRWWYVPASIDKGRRVPAAKSCTGAACLAGWGVAPDGKYYSSQGQALTAANEDDVTRAETTFAEAKKAWDAAKKAMKKSKIGGDEASHPHKLAFDAAKAALDEAKKSATQKEIINLWQDPQADRPANAPSAGRWRESGNYWAWVRQRAVRALWNANGLASELASDAEE

SEQ ID NO: 1594 - protein, 1605 aa, unidentified
  REGION 1..1605: note = Cas Enzyme sequence
MSTVYRSYEVLIEETARNHHARKAGKTKKELHPNHLNTEQALKTTHEVFQDAVCYYILCILGLIKGGKDRNGKVASPLWNSVTADGRLGETHELVKRLAESYPVAPFSDATTVEEFLSAVYGERTTTADRAAVMAVLLAQIQKKDGTLDCGDFAEFARDNGLRFCSSDSTRALPGCAPIDRLFWRMAAAKGPSSYWDIIKDYWKELARTPTTTERDQYLKAFEEKTNKQPLGISTDLFEQCRDKIAAAQDFTDFIWFHKSGPIGTLHYAIARYSWLSAHHADSAARSEAEAKLSEYVRKVLAKDFPETEHSKPVMSEGLEIVGIPGTRPTFPYFTTLIGCEFEAQGFREKFDESALKRAFDEVFKYRNRSEERERLFSQRHAMVKAMESDGIAPLFSEKLLSGGGKRSAKSKTPKKHAAPRNLGGLKGDEKRVNAMNDLIGKIGGQIGYGLRRATIGGWAELRSEFLKYVRKAKKEGNDLDEDELIEIVSKAQGDSAGGFGSAAFFRELCKEDYHILWLPKAEGLSEHCPKNFVRWWVKYSEAKAELEKIAMLPKGLTDWKDAVLKPISFTWPGTKNRHNEESFRPLDFACDLTLRPVVQLFHREKKGAAIKLVETNSQWSEGKDGKWSWKLDLAGDAPYPMTLSFRRLKRDKLVRADGESFESFYGIPLAAIDKAALPDMQPEDKPKKPKNLSPSASLLPPGKMNGPFHLMFAFKVDAKVLQDETKQLPGVKSLRTTKKNGKWVGVNARWSVDAKTEGKVEEAPTIVDEGEEPVASVGAFKVKELWSELDFFEPFDILSIDLGVRFTAAWSRNQISTGGKPSPRAREISPHGHKHQIWFDSYQRGVLKLQGEDAEEYRKGKGEDCYPDKPLPEKYGTKGRLASDAERVKFAELAAAILPVSKRNTLPEAQDQKFFPLLGDHLTWRLRRRLSRLKFLFTLRWRAVGKKDKLDVNDYREPKAEAEWQELRRKNHFKAIECLAFQPEEPEEGEELEIEEAFMEELRHALCADDEIWKSLRYEHGEKAFALFRKVKGKKEKVGKADVKTQKEAQKKAQDALKKGLVEKTDDRWNWRALADEAGNQIEEVMKAVEGQHGWIAEVAQFVWPLRDKDWIWHPCRYDGPNGELSAQAFLERDEQSGVKDKRHIRGMRGLNIRRIEVLQDFRRCLQSLAKIERRYRQPGTDHGLEPSKVELGDTVHEPAQAFLDNINELRDQRVFQTAHLILAEALGLQLMNPGKVIIDEKNKKELKSERDLHGRYEPKKDKDGKPLPRVSAIVLEDLGRYKTSQDRSRFENRQLMEWSHGKVVAKLQDMAQVFGIEIIIVDARFSSRYSSRTGAPGVRCAEVAIGFEKEQPWKRWSEEKVGKGKDRKPSERAQFILDVAAKLNEVNDPKASLWLPQDGGPAFVPTVSHAADKEGIEGSADINAAVSVGLRAVAHPDRLDVFPVLRTEAKAEGELEIQNRRGSLSEAVTKKAEERTVRIVEPKAKPTKEEKGAADENVEDEDSDDELETTKKPYLYAAVKVNGDFSVPLGADVRYQLPVKQNGELVTARETGCSAATGKDYWSRVKRLAWRRLKKINAARLHTRKCGVPDEWLKPDADNDIPP

SEQ ID NO: 1595 - protein, 1630 aa, unidentified
  REGION 1..1630: note = Cas Enzyme sequence
MADRDDPPKLSPTPRAYTLRLAPAAPDDPSWRSRLWRTHVAVNRGAAAFGDWLLTLRGGLDHGLAELPELTEADIQQELVELRKAAKSAKPAPKPAPDEADARASAAEKRDARLGERRVLLALSWLTVEVGYTGPAQFNLGRDKLKVTEALCEILQQRGLTPPEIDDWVRHCRGSLEADIKDSATWVNRSAAFDAATARLGSSLTREEVWDLLLPFFGSITGYLEPVALEGEETGGEEKAKDLVQKAGQWLSSRFGTGQGVDFTRLARVYDAIKQSAATAVGPIIQTAFFDRLAGALAEFAPAAATPEAILSLISGPGYKSATRNWVKALGNQAVISPEDLTKFARSADEDAEASRGKTGGKGHREWSDRLLAQVEAACGFSYLGGLKSDKPADDEAPEREAARHSEFAVMLDHAARRVCLAHTWAKRAEAERRQFTCEAAKLEPLHAQHTAAVQWLDEFCARRSASSHAEDAYRIRPRAVEGWKEIVAAWRKAACVTPGDRIEAARALQDSDQVDKFGDIQLFEALADDDARCVWESGPDLLLDYAKATDAQHKKQRFKVPAYCHPDPLRHPVFCDFGNSRWDVDFAFHRARTGTAEARRTVTRRREAVAKVEAQLAKAKDDTARADKQSQLAEARTKLAEAESHLRWLETPRAITLTLLDGDRPQPTGLRWQSKRLAADLALADAAPADSPAAPATVTRADRHGRASAGVGPGKPVVVLGLFKQDHWNCRLQAPREQLEALATHLEKRHLPLQDEARWDERARSLRDAIGWFVTFSAKLQPQGPWTEFAQQHADRIRPELKDGEIAVAPRGKSDWSGLAFPFWHLDNQKGRTGRALHALSRLPGLRLLSADLGHRFGAACAVWETLSPESLRSLCGVALPGPDQLFHTVTTKGADGRDRTTLLRRIGPDTLPDGTPHPAPWARLERQFLIKLQGEEADAREASNEEIWFVHQLEQACGLAVPLVDRLVAAGFGKSDQWPKQRVRLDELRRLGWRPASPAIGHPLSPMAERRPSLAVDELMRDAVETLRRALDRHASRARLARDLNNLRPPGMGGKDRATDLAGEDLVQHLQELFLEWHALAFHKKAPEIWAQDFWKLHIAPHLKEQLADCPEAGETGPARKKRIGTNRDKLKPAAEHWAKRDRMALAARWHAAWIEADGKPAEVPAREPGATKGPAQTKPTSPGSGLHEWMRRLGDWLRPAGLRKDRKQSGGGTGTQTDWSRVRSARNTGGLSVRRLVTLREFYNVQKAFLGREKFADGIWDHADFAGRQPVQRTLDALERLREQRVKQLASRIAAAALGLAPAPPTPGERSAQGREAVRAARMRLSKLEPRFAPCHAVVIERLSNYTPDQLRTRRENRQLMQWSSSKVQKYLAEACQLNGLHLREVPPAYTSRQDSRTGAPGLRCVDVPLKDFLREGSFWQRDAEKVRRKSDRERKAAEQLLLDTFDSWKAFAAHPTPDQAQRLAHGSVRLLRAGGDVFVSAHPDSPAAKGLQADLNAAANIGLKALLDPDWPGSWWLVPCVRGTHAPKPDAVKGCPLFSDMKQLTPRHGTAGVKKGKAEREFVNLWRDPGNAPLTTGDWVESTTYWAGVQRRVAAVLRPHNGLSDARPSSAHDVRGNHEPEDDLVV

SEQ ID NO: 1596 - protein, 1630 aa, unidentified
  REGION 1..1630: note = Cas Enzyme sequence
MPGAPQRAYTLRLRGEGTAWREALWATHEAVNKGAKAFGDWLLTLRGGLCHTLVDMDVPTKGKNPARKPTDEERRDRRVLLALSWLSVEHERGAPKADGLRVATGKDSAEARGEAVKATLLEILKGRGVKASEVTGWLDECGASLEARIREDAVWVNRSKAFDEMIKKEDQAKAREDCRILLWSLFTDDYLALPRKQAEPKEPAGSEIDQQDEQSENTVTEQRLAAVVKSGKGAGQRTRHPFSHLFGEGKPFGNPKRSLSLRDFWNSVLKPRIEESGIPLRPVDKKRGNKGSELDTGRSQTELHREMFSKAAARLAQIWTKQKQQDVEREERRTADEALKEMERKPAYADALRSLSTYSEQYRMSSGAVGEFRIRPAQVTGWDRVVKKWAAISENNAERAEELRIDLAKGLQDDPDEKFGDINLFIRLAASEYRSVWWHNGKPNADILMRFIRAKKARSDAERLKVASYRHPHPYYSPVFCQFGVSRPTIEFRRLKDFTNKPAGQDLRAVGLLLWDGAEADVHVLLGQSKRLDAEIGSACDSAVKDGSHLPEVSRRTRLGAAAAGLPAGGLSKVAGVFDPKPVKKRGADVGEEEGTEGKVKQPRWNGTLSTDRRALEVIAALLDRARRAKTDPSERKKLEQRADKRRQQLRWTLTVSMELEAHGPWYDFIRNAPDKAPFERTVRRDQLNDKDDESSGLRRKAGDRYISTEGWPWEEVNKPLKNKENLNTGENPSLVDDKSRARGSHARLVLCRLPGLRVLAVDLGHRYAAACAVWEAMSSDQFAKEREHAREQGAKIESTDLYVQVLWPERETNAATKKARQEGRVKRFHPLTVYRRIGADKLPDGADHPAPWARLDRQFLIKLQGEDKPARESSDEEIWRVHRWEAGMGLAAPLVDRLIRAGWGKTDKQSARLGALNALGWTPLAESAAATEAARTKRPPSLSVDELMSATVQNARLALRRHADRARIAFGLMSDHEPMPGDRKFWFHKPQDDDTEPQSDADSKATKRAARHTDYLQDVLVLWYELAVSGKWRDDDALTRWNDAILPLIQKVQFTGPPPLSEEDQKNKDKSERHKNKVKRWRDIWDNILSKALARPGAEAEDLREGRERKADREALHALIEPAAQALRQNEQLRRELSTKWADHWLGDEGPRRCNDNDPARSDFSHIEGKDAHDRKASTTAPNVTTSGWHARLREIGDWLLSSGPRGPGPDTDAQTNARRARGQAMNVGGLSLIRIDALVEFRRALVQFRTAGTPWGRVEIGKDAKPTNTARVAPEKYAQRLLDVIDQLRVQRSKQLASRVAEAALGVGREHLRPTRREPIRKCWCGLAHGKKDPERIGERAYPSCHAVVIERLDNYKPDEIRGKRENRLLASWRKAEFKKRLAEACQLHGLHLREVQPGHTSRQCSRTGLPGLRCDDVRADDFLMAPWWRKAVNSARKRIRDGGKDRLDCLFVALDEKWNKIGAEELKNVDLFRLARKGGDLFVAAPPPSCLSKGHDPCPLCNGKRALQADLNAAANIGLRALFDPDWPGRWWYVPCNPADYKPHKEKVHGSNAIGLSNGLRESQSQRTTKRKEDKKDREIVNLWRDPSGDPINAHCGPWEDHSKYWNGVRCRVIHVLHKHNGLGGAP

SEQ ID NO: 1597 - protein, 1637 aa, unidentified
  REGION 1..1637: note = Cas Enzyme sequence
MAGELYRTYEVLVEESVVRDADKDPKTKKDTHYNPEIAAALRDTNEIFQHAVCYYTLLLAGLVRDAKDPKDSTGERLLNPLWQHLRSGGMRQATDALVRRLAERYERLTGVADAESFLDKLFIRPAQPGDGGQDDALAHHHTRTYILLEDKGTERDREGLPTKCTDLATLSSTFFRRFCDPDTTQQDSTQEVRNNNYFAQLHTRLAAAKQGEDSSLAKAIDLRFCMMTPLRETSGEEALRDYLAAFRALPKGQPKWVGINEVAGKLEIPHFEVHRQRLVAAWGPQPVRQPGEKAEVFKARLNVWREKVKKFPLNSYAGKKPNQRLWFCLRYRWCQDEESRCHLLEFKNVKDCKFTAIADGERDALTATRLFLGGKNLFPYFTALLSGGRDSLNPAFDVSAFAAAAEDLFKYKIRTQDRKRRYDRFSQARDAYQGVGATKLDAKRSHTGKPVTILGMGDDPRAGKMDKLLSDLASKLQFVGKYGLRPGTIGGWADLRKTFRQLERKAEKEKWADTRLVGELQEAVETAQRDNPDGFGSAAFFEMLCESEFHCLWSAKLPTAGNRERHAADFVRYYVGYSEVLEEIQALEEIEGETKHMAPIRFTWPGTKNRRNKTSYRHFDFKQKLGTELKGVRLFRKLDRGKDNFPAYELREDDTLTLAARRLKRDRVMTADGSVVEALWCPPLALENANDSEAGKRVPKIGKTKKGAKETKAPEISFSLMVSDPEDDGTEPPTYLKVAIPITPGELNRTLRLNKLQWAGSLAWDKEGMDFIGKHLQWPVDLRVRQAAKVRALAEEATSEELKSALEKAAKALAKGDRKAVKLIQTEIKQLAMSLPEADAEVCKDAGEYIADATKPLWCGDADKKIEQLQIGEQRRSEFHALSVDLNVRFAAAYARLRVFVNDGNTPPEVLALSRRLAPGGAHATDIRAHAYAHATLRLSGEDAHVWTKTGKGVFELRPEDYGKKGRLPVDDPTRGTEETKDFLALADALVPLKSLPVKSVETLSVPEMGDVLIRRLQRRLSRIKSLFKLRWRIMGLMERNPDTFKYDHPRKPEDQKRHRREVVTLLGRLAFRQRQEDESEHPDNKLLRDALNRTEDDWKAISERLDARKEEAEEKLRCAELDAAVEEWDWAALGREIQKQLDSLLDAERGWENLDQPLRKKLAHLPHPERAAGWIELLALLVVEHCLPLRKRHWHWKGRRLKKPKEDEAPGHVPMIRGARGLSVARLEQVSQLRQAYQSLAKQLKRYHDYPQEPGKPGIEPTPTERAESVDDCCEPLLDKRNQLREERVNQIAHMILAEALGLELEDPAKATWEGLSKREAKSACDLHGRYRHKLGRDGQPLPRCDLIVLEDLSRYRTSQDRARSENSQLMNWCHRAVVEKLRDIARPFGITIVTVGAAYSSRFHSLSGLPGVRVNHVSREGLAQMPYAAWAKQTNRNGKPSPRAAWIGELLKLFAENPGFHGELLMPVDGGKEFLPIPRDGEERATHNGLKNADENAAINIGLRALAHPDSLDIFTRIQTKAQDEQTLRVRNRRGWFAELAAEAEERSARCANRPDAEAESSAAAEPDEPEDDGVETAAYPNLFVIQDGTILLPEHELYRHERFVAARYGPYWGRVRNLCEDRIRELNSRLLQRS

SEQ ID NO: 1598 - protein, 1642 aa, unidentified
  REGION 1..1642: note = Cas Enzyme sequence
MNRIYQGRVSKVLDDQSHELDLDVLWQHHKLFQDAVNYYVVCLLALAEPRNEGVWQIRQRLNATAANGEDDELMVWRPFRRRGALRSGMRDSVAPYLCPNKPDATPEDCFAAVLAGNECAQAEEGRARLSDGLRQLLENCTGDSGPRDCSKEYLPRFCRTKSRCNYPESAIARRRAYHEKLMPLVLHFPMTPNSKELEQFNVFSTVLPDYEKPIHAGNDARELLAGMIADLKAKFPAETAELDRLAQLVDQKPDTFRVPGYQGSSAKGEKKLRLYAMFLFRYVKRSEFTLRLLRATTPKPEDDANFAFLVHGQSDPNSLLLNPFTTELIAKRDKKKETFNANESAAKLKDMLDDWRKELPDEADNWQRLATKIGAFQGELPSYAGVQRAKELVENRRLRLFALYLFKYVERSEFTLRLLRLATPKLTPPTRTEMAAGDPVQKSRGQRGYVFRAFTALDCWQPTDPGEPVWLKFDEAALQEALKSLHQINSKKTERADKRATALDRLEYQRQCAFRRETKPDGSEDVDLKVENAERTKKMWKSGGEETTPPPVLVGDPRIARLEWLLSSDPAAGGLAEEYEMSEGVSVEYGLHQRTIRGFRDLRKKWNASLVARDGSENILSILKDYKKDNPELIGSHKLFDALAKEDNWLIWREPTAEEIGQWRKAAGISKDVSFAEDPLQALTDERELIADIERLSGPIRFTPAHPEHSRRQFYFSDVTDLTAKNRLRHDRQTVDVELGIKENGVWKKKDVRLQFSAPRLLRDQLNNACGKDAVFQQAMMEALGIRATLTKTEKSKPRKAEFEECAAVALMPEVRNDGSKRILLNFPLTLDGESIVNQLGKAERWHELQFGGADGESYWLRWPKTWIDEKKDRKKAPPAPWWCNPQPFQVLSVDLGQRVAGAYALIEATPGNPPKPQSRKLGTAGDKTWWATVKAMGVLHLPGEDAKIRRERTRFDENDDNGANGLEELSGRRGRMASPTEWDEARDICAKLGLIADRVMGNELSRYSFPEMNDRLLYALGRAQARLARLQGWSCVAWEEKDDKLKAKFEKRRTRIQEQIAEAIAARAEEAAKPEAEREQESLERGRWLDEAKPLVERNAWDCVADCIIREVRKEREIIQQQLVRIANRVQPLRGEWDDDRVKELVRRLAAETNFNSPVTRSLASELAGFVASGDSAKAVHPIKQHLSRDRNEIPADLLRHAEAVQPFLGRSWKWEQRSDGKNHWLVIEKTGVACFEPVKLAGQRGLSLARIEQLDSLRQRCQSLNRALRQVPGEPARLGRSKRGIELPDPCPDILDRLDALKEQRVNQTAHLIVAQALGVQLKPHEKDEKERIARDIHGEYERIPGRQPVDFIAIENLEYYNMTQRRERSTNARLMKWCRRQLRDKLIELCEPYGLRVVEVWPADTSKFCSLTGVAGFRAVELNPDDAENFPWKKLLDRLREKEAAERELDKDELKESQRIMALFDKLVELNRGLLAERAKARAESRHFRPKWRTLLAPMRLGPIFVPMRGRPMQADVNAAINIGLRAIAAPDADDIYTRIRAKSDSKVFTVRAENSREKARWEKDVPQIAVKNEESRQKLFAEKWLNFYFDFGSVATFDQAVIEEIQVPVSSGRGLWGSVNQAEWCRCEELNAVRLTQG

SEQ ID NO: 1599 - protein, 1648 aa, unidentified
  REGION 1..1648: note = Cas Enzyme sequence
MAGELYRTYEVLVEESVVREADKDPKTKKETRYNPEVAAALRDTNETFQHAVCYYTLLLAGLVKDVKDPKDPADGRLLNPLWQHLRSGPMRQATDSLVRQLAERYERLAGVTDAEGFLERVFVRPEKDGPAKERMLEQARVQTYRLLEKQGTKLDKEGLPTECETLNVFASSWGSILCDPNNETEIPGNGVYDIIHRRLLKAEGNSEAVKRALDEAIITSEETHRGDFERELAHDIAKVKSDKAKAKKVAAKEQLFRKFVEDRRSQTRSNVCKALSDGLYSKPRDLGMSKEEHDLAEKELAALADEAKTTALDDPRLRRLRYGARDNSLEKPLFRLLWLRDSPQWAPLVLQDFCNYLEKEKPLPEPELDGGHLAEAPFANLTKNLFPLFVPYMLRIPSRERSAWWNFDVSAFAAAAEDVFKYKIRTQERKRRYDRFSQARDAYQGVVPKKLNVKQSHTGRPLTILGMGDDPRAAKMEKLLDDLASKLQFVGKYGLRPSTIGGWADLRRAFRRLERKAEKEKWADTRLEGELQDAVVKAQGDNPDGFGSAAFFEMLCETEFHCLWSARLPTPENRERHAADFVRYYVGYSEVLEEIQAPEETEWETKHMAPIRFTWAGTKNRHNKTSYRHFDFKHKLGAELKGVRLFRKLNRGADKFPAYELREEDTLTLAARRLKRDRVMTTDGNVVEALWCPPLALENIKDSQAAKQAPKIGKTKKGTKEAKAPEVSFSLMVSDPDEYETEPPVYLKVAIPITPTELNRTLRPNKLQWGGSLAWEKEGLDFTGRHLQWPVDLRVGQVGKARALVQDATSEELKSALERAATALANGDRRAAKLVQMEIKQLATSLPEAEAEVCKKAENYLGDAAKPLWCGDADKKIEQFQIGEQRRSEFHALSVDLNVRFAAAYARLRVFVNEGNTPPEVLALSRRLAPEGAHTTDIRARAYAHATLRLSGEDAHVWTKTGKGVFELRPEDYGKKGRLPVDDPTGGTEETKDFLALADALVPLKSLPVRSVETLSVPEMGDVLIRRLQRRLSRIKSLFKLRWRVLGLMERNPDTFNYDRPRKPEDQRRHRREVATLLGRLAFRQRQEDESEHPDNKRLRDMLNPSGDAWKTIGDRLDARKEESDEKLRCAELDTVIEEWDWPALGKEIQGQLDSLLSAGRGWENLDDVLRKKLAYLPDSERAAGWIELLALLVVEHCLPLRKRHWHWKGRRLKQGKEDEAPSHVPMIRGARGLSVARLEQVTQLRQAYQSLAKQLKRANDYPQVPGRPGIEPTPTERAESVDDCCEPLLDKRNQLREERVNQTAHMILAEALGMELEDPAKATWEGMPKKEAKSACDLHGRYRQKLGRDGQPLPRCDLIVLEDLSRYRTSQDRARSENSQLMNWCHRAVMEKLRDIGKPFGITIVTVGAAYSSRFHSLSGMPGVRVNHVSRESLAQMPYLAWAKQTNRTGKPSPRAVSIGELLKLFEENPGFHGELLIRVDGGKEFLPIPHTQEERATHNGLMNADENAAINIGLRALAHPDCLDIFTRIQTKAQDEQTLRVRNRRGWFAELAAEAEERSARCASKPNAEPESIAGAEPDEPDDDAVESAGFPNLFIIQDGTILLAEHELYRHERFLAARQGPYWGRVRDLCEGRIRELNRRMIQKP

SEQ ID NO: 1600 - protein, 1649 aa, unidentified
  REGION 1..1649: note = Cas Enzyme sequence
MSAIYRSYEVLVEETASNHKTRSAGKTTKDFKPHFENTCRALKITHELFQDAVCYYILCLVGLVKNERDKGEPINRMWEYLHSESKRSITNEIATHLGRTYFKQSNLGTNPTCKLLEFVYASIPAKRLSDETDVIKGVYQQLANDAVQIKKQGKGKNAKTKEALADMAKFANNWLQRLAFPDSKQGGAKAIADNNAYWLQIANALKTVIEPKIQPGFDDSAFAEKLKLEYCFNTPAASLHGEDALRDYGKAFAVIDTNDNNSFWENPPKTVTDALARYANPYDSKTPKVRFEKETATLLEIGRDSKRRSKFAHAAASSQFKPSGTYWASLRYKFAPSPETRLHLYENIKTRKATDAADALDDVRKQYGFVFPFFTNLLGLKPKAGESAVWTTFDKSAFKRAAEEVFKYRLRSNERVEQIRRRHAKIEAMNGTGEWTDAKGKPKQLGGIAGDEERPRLMRQLLDKLGGTIGYGMRRATIGGWADLRQKFLEIAKKDEPIDEDDLIAAIEKAREDSAGGFGSGALFKALCEEEYHPLWLEWKNKPAHHPKNFVRWWVLYSEAKEELKKVWNEETNPPKPKPIAFTWPSTENRHGETSFRPLDFDAHVTPSPVIDLFDQEKGKPRTLVKTNTPDENETEFYPLTISFRRLKRDKLVLPDGSSMESYYDTPLAEGLNKKPAAPTVWLSPNHRKELSDAIDMMLKSEKFQPMQKSLGKLKQNFLTRSTNYLPIVHRYFRLAARLKKLGADERKKLRTLANKFQSISASASLLPPGNDGCWHFMFSFKLETDEQKKLVDENAKIPGDREGSVRKVKKNGKWIGLNLRWPIDLKTENPQKKEEETTVLPDGEEIEETDAKFSVKKIWCSKDFEPFDILSVDLGVRYAGAWCRGRVKIGQDAERPNQRKISPDGQGQEIFFDAYDFGTFRLQGEDAKIWRKDKHKGFSDKPEPEKCGSRGRIASGAEKTEFAQLAGLVFPSTKRLPIPDDPAELKFFPDLGDHLTYRLRRRLGRIRFLFKLRWQISGTKKKVGHDYKDLTGDELKTFRSEQRFNVIASLAFTPKDDEPEEGEDDFMRELRLKLASDELWTELVFECEGEAHPLFSKIKGGGSKDEKVKAKKKKAAQKAAWAKLKGELESGSVNKWNWSALAKAAQSELMNTMTVFAGEQSLIAEVARFVWPLQDKKWKWTTCEAKKDGKQSVLERDKNSNEPKRFIHGMRGLNMKRIRLMQDFRQCCQSLAKLERRFYREDDFGLEPSPVRPGDRVHEPAPAFLDKINELREQRVNQTAHMILAEALGLELMNPAKVTMEGKSKWELKSERDLHGRYKHKNQRVAAIILEDLSRYRTSQDRSRYENSQLMEWSHRAIIGKLQDMAQVFGVQIITVDARFSSRFCSRTGVPGIRCAQVAKGFENDYPWKKWKEETAGKADADGKQKLTERANMILLAAKKLTLCENLKATLLLPMDGGPAFLPIVSHDPKKEGLQENADIGAAVNIGLRPIAHPDRLDVFPVLRTEAKADGRLEIKNRRGSLSEAATVNARDRTVQPVEIPAKNADEKTEDEVGADEELESGKFPYLYAAVRVGNSFSLPIDAKERYQLPLTSGGREVAVNDPDSTSAAKGKDFWWRVKRDCWTRIRQINSQRLKNLGIEPPKEWTNP

SEQ ID NO: 1601 - protein, 1669 aa, unidentified
  REGION 1..1669: note = Cas Enzyme sequence
MNRIYQGKVTAVEISDGKDEPGKPLDLDVLWRHHELFQDAVNFWAFALAEMARGMMQKNDEGEDVQTPMAEFADKVFERWEDFSHKGTQREGLKHSLSRTLGLPLNEITWEKCAERIFAAVLEKFPGRKDSNGQDVLHGVIGELFRAGRGLAPKNMANEDPSWLCWRDKREKENTPATAFIRKTRGITGFMDELFWADAEGIKRVAQLPLADTFLTSMVTPSGIEPSSDDPEDDGDNQIEEVPIEDSAVNERVFFLGREAVTELEAYFKSAIELLKDAAFIRDFDLLGGKKFEVEAELARITKKIELRKQAIAADPESLCFQRWKKQGPKERDRDRVRLFVLLQFDEGSEFMGTMLRARLLRRKDSYIEHLHSTDKVRYVEFVNRFGLCGLASEGKEAVEKVKAARKAIASEVSTAANLSASSTDFIKTLRATVGYVFPSFTAIRSFVAEEGKAGVCQHGEMGWKKFDNAAYEEAVKAPHQIQKKKKERDADVKKLRAIEKLYQGEGRRKGGDDDDEGHTPGGFSKTGDPRFSAMERVREKLSVEDGVEPGKFYEYTISEAALRGYDELRTAWNKKVEAGEQFSPGKAAELQQVLKDHQTEHRDDVGAVRLFDEFLKEGNWCVWQNEKEDIEKERVAKNYSDNFVRDYLRFVEIVDERKRKQKPIQYTPADASESRRLFDFKGGAGLKHTEKAEELSFTTQIAVKCSELPNALYRTQDVRISYTAPRLLRDEARVLSESEDLKSANWAQPMMRALGIPNDSRHDFKTHAVSLMPDWHAGSRSLTPDRLLLNFVLMPKEDKFVESIRKQMGREKWPWLMQFNWNRDKHASTLRWPHEDWSKIKSKKKFPGFWFEDRTLTKFRFLAEDLGQKQAGAYALVEVSCRYSDEEKKKKHARFIGRIESNGDRRDWYAWVVLTGLHKLPGEDAEVLRPEFANGKPVPGTKGFREELSGSAGRNATDQESRGTFEYLKDSEQLELLDEDARTIAGVQKALTFPAQNTKMLIALRRVRTFANRLHRWCWFLAPTDEERKDQEDRRRTVIKEIAEADAHPWLNKKTHELAKEIHARVQAAQEKGEKVAVPADPRITVPIKLQLEKLESKLPGLLEIVANRIYASRKGRFVWGKNPDKDSCHLLDFVEFSKDELAARKAISKDEKRLAGQRGLSMERIEQLEELRKLCQSLNQTLRRPIGGKPPISRDDSIPDPCPKILAKLDEIKEQRRNQTAHMMLAEALGLKLAGPDERPESGDDAARKAQEAKDAHGEYVKVDDKGHAVADNDSKAWRGVVDFIVIEDLSRYLTSQGRAPRENSRLMKWCHRAIRDKLEQMCEPFGVLMVETPAAYSSRFCSRTGVAGFRATELSAASLAESKWKWKTRKPNDEAKEKPESKKRREQWESLYERLRKANESRDGKSKGQKFRTLLAPEAGGSVFVPMADLNREHQRPAKDPNHPKKYRPIIQYCLVTLEEGQTKEPRLIHSDINAAVSLALRAVASPRIWSIHSRLRSERESDAPPKPRNKKSKKEKDAQKAGQPLTEAKPDRFFVSESEKRKFRSREKPKHKTDAKTDAQDGDESKPEKDTRIKIELNDPKQADLKSSDSHHPNFFADFANLAGAHWGAAKLEGLEHGEPAPTHLVTGKALWGFIKGQTWKRCLFINAKRLQAWGITPPKEWELE

SEQ ID NO: 1602 - protein, 1671 aa, unidentified
  REGION 1..1671: note = Cas Enzyme sequence
MANDLYRTYEVLVEESIHPTHPKRAKDKDGKLLKTDKPERFNEAIDSALRDTHMIFQDAVCYYTLCFAGLAGNEPPPDGERGRDFLNPLWKHLTTSAKEGGILHETERVIRRLMAHYKPLAEVEKAFGDTLAEKFLNTVYSKPLQIREGMTEEQMTQVRGKRAACYEMMEEAARNKKTGELNCEGMAPFAKTWTGLMCVGKNASIPSELPYARFAVELMGKIESAKTDDEKLAICRETIVSYRKDPTASTNKKLDSEFERKLKKLQLEVKKLEELPVDDARTDQLAVSKKELEDFEAGKEKWLKKHWEGQLVADVKAAVTLQFLKSTTAAKLEMTEAEFLEAKSKAASAKPESKTFFRFREPPVGRQNKLEPALFRFWLLHDHEDPLVRRAAVGEFCSLVKTSAPKKKAVTGDEGGKRMPFGLEERFAFRFFGKQCLEITGRSTDVSSPDRDLDVTAFQAAVEDVFKYKIRSHERAEKVAKLATIVGAFEGTAFLSPEQSPTGKRISGMGDDPRWKGAREKKGIRDVLKSLSKEKEIASYGLDEGTIRGWAEVRKGFLKLYKRAKGNPKRIKLLPQLLERRVDKEQAANRQGFGSADFFHALCDPDYWHLWLDGADHESNGIKDFIPHYVGYCEWREELVGLLLKEDGSELERETDLSSAEMARLAKRPIRHTWPGLLNRHKEPSYRYYDFTTKLHVRLPLRLFRRVRPEDDRTRVLEYKQLPKSQAVLTLLARRLKRDRILGKNAETGEWSSVEALYCPPLVLAGDAEPTAATKPRAGKKKEKESDPAEVSFSLIAAPLPGDYWNEVAEVPSETEKKPVHLTVSIQLVEAEQTKLQAETTQWLAGSLRKFPKKEEKNKDRRRCFVWPIDLKTSKFTTDDAVERAKLLWCGSGEVRHDWKGFAVDGKRSATPFESDFHILSIDLGNRFAAAFTRLRIHAEANGEGREISYRHTPAIKAEVTREGTLRLQGENAKVWDHVRNEDGTCKKDANGNYLYALGDETYGNGGRGRFPTDEEYEKRFVPLAERIVPAQALRLPGTEQTYPELGDHLVFRLKRRLGRLRTLFNLMWHLRGDKEKDMSGQYTLPRKPDMEPGHRRAVMESLARSAFPRQERPSDEVEDADDASLRLTLASEENWKEWRPLFEKKKGKEEAARKEGLEALAMRHDAGKWQELAEAVKKQIADYCEGANPLDRLVVEVIEFCLPLRGRHWTWTPCASGERLTWGNEDPNWQPNVMGMRGLSMRRLQQILDLRQRCQSFAKLEDRYHGPFKAGNYNPPDSTRDERPDCCPKLLERSNRIREQRVDQTAHLILAEALGMELKNPAEVANKKARKAEVDLHGEYRRRLDKDGKPFPRCSVIVLENLDRYKMSLGRTKAENSRLMKWAHGKILDKLEDMCRPFGITLMLVDPAFSSHFDSRTGLPGVRVEEVSPGFEQTYPFKVWKEQVDSKKRPTKLAAEIKALVEAFAKHGNYNGTLLLAVEGGKEFLPVSTPAGIKPGPINADINAAGNIGLRAVADPQRWDIFSRLRTKQASESEVSVLNWRGWFGKFPQDTKEKKSEQRRMRAVTATDAPAESAASQATSGDGADAAGSESSQSSEYPWFFVEPPAFPRLHNGDWLAEEAYQYQQDDMAFRAFPQGAFLKRVEQLCAVRIKIANRARLENRAGDADDRPE

SEQ ID NO: 1603 - protein, 1676 aa, unidentified
  REGION 1..1676: note = Cas Enzyme sequence
MMQPARLRVRVPVREQHQEDRQTTVAKSNNTTTRSYTLGLLSTSDTEDWLPLWKRLFKMHDAVCRGAREYGELYLNLRGGLGSSLAENAKEKDAERRRLLQRGARRMLALGWFSVESVRGAEHHPFRVRERVCTVCKGLPKPGCQRDHQDEVSELKPGQSLPAELADRLLREVLTDHKGVTKEGLLDEWTQDCVLAITAQIRPDAVIVNRAAAFADWQRSVVDHGAEMPEQACRILFAMCGDGFVSLTLPEEDAVRQDDDPEESESTVSDDAEGKDTSKPKGDVDDVEPSNASRGVFGDLFGGDAAEKVSRATRKQEFAIKVREMLEGLHAPPTQEAVDEFRKRLGLPELDTSKPDKYPKEVSSSGHPTAFAIRYRKLLVSLNLWPKSEEESGQPRAPAVSKFGRRVEAKDEQSRNAHINAMDLIDACPKPNELDNGLNDASTPARVFTPAWAPALADRVAAITNMPVNAKPLNEFKRLMFALAARRISQTQTWTKRNEAERHKAAVKEDAARKKLEELDPDSLARDWLTAYEAKRGDDSLATMDFRITRRMIGECDAVFKAWRGVESSEEREKRTASVQAKTEKFGDARLYTDLSEDSAGAAIWRHEQGAEIVKQWVKLRQAQFDQQRLKIPRFCHPDTFHHPTWCEFGGVSKPKVWYAWKPDNKPQSPEPGGDADGSRRLWMLLPDFGSEQAKAVPLRWRSKRLSKDLGGVKEYTEESIPRADRLSLAAANLPRKDAENKPIRYRPAHPFVKSKKGWNARLQIDRDTLERLERYWDCERREWRDGGKHLRQCRWFITFAPALAVSVGPGCRLHSKLGWRSGPHAELNKKQKREGHAKLILSRLAGLRVLSVDLGHRYAASCVVWHTLAKADFQKEVHGRTTLAGGTREDSLYLLTRHQDPATGKDRTTIYRRLGQDTLPGNVAHPAPWARLDRQFLIKLQGEEKPARAASNGAMKDRSASDTNEAEIVANLAKCLGLSRDESHVRSGRGVDELMGRAVRIATLGLQRHGRRAKIAYAFRPDCPGIPGVGGALNAAAVSERGEAYVRFLTGALADWHALATDTEWDGSHARDLWNRHIATLPRGFQIDSPSPNPDDAPPSRQQRRKINDTLRDEKIQPIARHLASLPASATEEMHKEWAARWSADDGTERTKDDFAHTPVVNAAGKVTGSSTSPKSGTQPATGWHSHLRILTDWLMGRRLPGQRSTRWNRYVGGLSLTRIATMRSLYQLHKAFAMRPTPDKVQGAPKFGESNTGIAQSILDAMETMREQRVKQLASRIAAGALGLGGHWKQVRVPLRDKDGKPRRGEDGQALFKTKAVWQEDQEAKHPTCHAVVIENLRNYRPDELQTRRENKALMSWSSGKVRKYLEEACQLHGLHLREVQPNYTSRQCSRTGVPGIRCTEVPVSPETGKVTAYWWNKTLAAAKKKVDEGSEDSEAHLIVDLDRNLLALKTKGETLPKSVIVPRKGGDLFHAAPASPPSVAERRAVRTIQADLNAAANIGLRAILDPDFAGKWWYIPAVVVNGRRVPASKSCAGAACLNGWSVAPDRGSFTNTGQALIASNNEDLANAEADVAAAKQAWDREKKTLKKTGGDTKSHPFKLKLDAAKQTLAEIKKSTQQKEIINLWQDPRADRSKPDDGRWMESGAYWGWVRRRAIDSLRLAYGLTPKLDQIVEG

SEQ ID NO: 1604 - protein, 1687 aa, unidentified
  REGION 1..1687: note = Cas Enzyme sequence
MNRIYQGKVTAVEIPEGKDWKKLNDGNWRTVLWRHHELFQDAVNYYTLALAAMAGGFGRDDPKSRENEIKQLDNKLESLVERTKKAKKAKDEAALEDVAKQKQQAETTKDRLQREEAVWQWREQVSKAFKEGVKRKGQTILWETETFARVLKKLEPGFTAVNDFEACCETILKPSKASPQLRSSALLRLLTLAAKKKGEASAALTPLCTDKIVWFCSAPEDLDATDDVEKSAAEKAAWEFSKQLDVAKDNELEALAAKLKPAVFMTRERGEVLKGKDAISALLSYFKQLQQNSPGLKAARATVAQKIRMIRAIEKNEEASMPFTFQLPKARVGLDYKAAKVFKVIPHAALAAVFRKQTETLAKKKTVEVLDCDPLKDARTKANQPQFDYFSNLAFIAAAKADKKQTKKRRVIIDENEDDDSDENRANWFEFDLLAFVEALKSPHRYLQDTVKRREECDRLQKRLDAMRGGGEEESGEGDDESSEKLSGFKGDYRIGLPGDADSVKKGVFQLIHDEELLAYREEDESSETEDEEPDSVQCPACGGRCHGYGINQNTVRGWRELRQKWREAATKPEFSGEANQKKLLDDLARIRREEQGDRPEESGSGPLFKRLELPQYHCIWNDKPPNPSNAEDPLWEWVRYRELHDELEKTKKAIRFTPAHAVESPRFFIFPKQNRKKSTAPKRGDATAGRRTDHLPGMFGFNDEKKLVEVKGDEAWLKDRPRFMAVYAGLILGEYPKLQPRPVRIIFSAPRLRRDRIRADDENSLGSVSLLQPMMEALGVAREELPEINFANCPMTLLAERRKRPDELAEDESDEEQKKPDCYDLNLSFPVTLEESTLKEHKLFQHAKRWTLQSYRKANAKIERHAQFQFSGDDEMREIAIRWPVDREHSPRKSDEAPAWYETMNRFSCLSVDLGQREGGAYALLDARANGDFGKNKGGKPVASRFIGQTGEKKWRAALAASGMLKLPGEDKRVFRPKTLASHAKPSPDDRNPEDAIHGKKFREELWGDAGRPPLRSTDPGALIDETEQARGLLGKDGFDQLDIMPPGWDKRRGNGNWSEPNTELSFPEQNDKLIVAARRYLSRIRRLHRWCAFLNSENWREKPEKAKQKRERALQEIREACGLDENSVAKHDEEANAPLKEEAWLAPSVKRFVESGADDSGLTEVLKTLLELMLAKLSEQFVIMANRCAPLRGRSWRWTKHAKSTDANPLRILLPTGNAKPNALMKMPDGTERKVTWIRGQRGFSMKRIAQLEDLRRLFQSLNQIQRRKIGTMPPCRKRGEKGDELPDCCPKLLEKLDELKEQRVNQTAHQVLALALGLRLKKSGPTKSETERKHSDIHGEYERVPDASQPEGFRHPVDFIVIEDLKYYETTRVRSRRENVRLMRWCRRHFRDKLKQLCDVFGFPVVEANPANTSKFCARTGVAGFRAVEVGPGFHEEYVWRKALEKLDKYRKDKKKNPLKPDDLAFCEGAEKLKQQVEKAQKIPTKSGNSLPCPRTLLAPLGSGNVFVPIVGAMDGTDLPPAVVQADVNAAVMLGLRAMADPQLWEIHPRLRTKPPEKEKKSKRGKKGEPEAPRKNPDEKRFPPDLFAAEKRKFGEKTIKLDLTNASEDGAIKDSRKPNFFCDLAGLAHWDKTVIPDPKTDRPISLPSGKALWSAVKAAQWKRVDELNQARIVAWQNKANAMPD

SEQ ID NO: 1605 - protein, 1691 aa, unidentified
  REGION 1..1691: note = Cas Enzyme sequence
MNRIYQGRVSAVEIADGHGGFKSLADDPKAARKLGEQMLWEHHALFQDAVNYYAFALAAMADGMVEKDKDGKEKPTPMAQFAEQLFGNGKPKTADGCIEGRWDDFVHKGGKRAGLKHSLARTLGLDAKSITREQCIDRIFGHAFAKFPKRADGKLHDVFRGVIGELFPEKSRGTPQKLANEDPGWLCWKHKGGEPPAEKTYRNQQGIYDFMDALFQADAAALRQLSARSVKDSCLSGVEAGEEAGEPSGENGDAPEANSEQEAAEAAGDSDDTGYLVGEDAINQLEQCLNTAKKMLKDKTFCFVFERFGGSNIDVTKELKRLQELIQAKRHDEEQRRKENPESASTFRIQNWKRSGPGKDNVRVELFVLFHFDGGSEFTATLLKARLKDRYAGWLLKNDKRRYVEFVDKFDLCGSDDGQEPAEKVEKARKAAAKSGNQPTVTSVARTDFIPRLKRKLGYIFPSFTAMCGFLAQEGDPAEPSGACKPGYFGWTKFDYAAYEEAIKSPHQIRQKQKERDNEAKKLEELKKLYEGKGREKGKAREKGKADDGEEEDFIPGGFSETGGDPRFAAMRRIHESLGVADGADPKTIYRYGISQAALRGYEELREEWNKVVAPGETYSAGKETKLKHCIAAYQRQHRDDMGDSRLFEELVKKDNWCVWQAPTPDEEKERVKNLYSTNIVRDYLRYCDVLEDLEKKKRPVQYTPADARDSRRLFDFKGASQGGFAHEASPDGLSFTTQIAVKCGDNAGVLYRPAEVRIHYTAPRLLRDEARALSENEDLQSANWAQPLMRALGIPDDDLHDFKKHAVSLMPDWKPGSRNDQPDRLLLNFVLTPKEDRFIAHVREEMGREKWPWAMQFNWNGDDHDSTLRWPHEDWSKVQGNKEFPRQWFADPDLKSFRLLSVDLGQKQAGAYAIIEVSCCLSDDERKNARFIGRTEHNGERRDWYARVLTTGLLRLPGEDAKVYRPDFKDGKPVPGSEDFRRELSGSAGRNATKAESQQTLDLLKEFHQLELLDDSIRDAATLSERVSFPDQNTKLLIALRRAQSFASKLHRWIWFLDPQDEVKREDQAKRRRIAIKEIAESDPHEWLNKDAHEKAKARNTQLDKAEEEPEQHPEIVQALKTQLKSLVEKLPDWLETIANRIYRSRRGRLVWRKHPDRPDCHLLDFTLRSADERDGLTEEEKWLAGQRGLSIERIEQFEELRKRCQSLNQMLRRDIGCAPKASRDESIPDPCPTILGKLDEIKEQRRNQTAHMILTQALGLTLEKPTEPKDHAEAQLRQAKDTHGEYVKADIKGQPVTPQKGNQWCGIVDFIVIEDLSRYRTSQGRAPRENSRLMKWCHRAIRDKLKQMCEPFGLPLVETPAAYSSRFCSRTGVAGFRATELSGDPMQEPKWRWRVCKPEERKEERTEQEKRRKQWELFFEQVKSANDDAKSKGLPARTLLAPDAGGSIFIPISRLLAGHERRTKGEPIVRFEPVMLEENQQKEPKLIHADINAAVNLGLRAVADPRVWSIHSRLRSERKPEMLSSHQPRRGRGKKAATQAAVIPVEDIKPDTFFVSEREKRKFGEQSKESRIQIRILTADEAMKQSKQAADEAEKRRLRQQAVKSVPKASDSRHPNFFADIANLHTWIHDHAAALKGGPTSVPQPKHLVVGKALWGYVSQEAWRHCMAINAARLKAWGIEPPEEWSRRT

SEQ ID NO: 1606 - protein, 1711 aa, unidentified
  REGION 1..1711: note = Cas Enzyme sequence
MANDLYRTYEVLVEESVHPDHPKRAKDRTSKPERFNAELDGALRDTHMIFQDAVCYNTLCIAGLAGNEELPAAPGEKPKPLNPLWKYLTSSAPGGINAETEKMICRLATHYKPLEGVKTAKDFLNRVYSEPLQTHGGMTDAEREAVMLMRAQCYRILEKYGTKQKTNGGLECEDMSAFANTWTGLTSIPGSITVIPGNGAYDCVSRELQERLKGVNDDEAALIIKQTLLRYSAEEEAQSKVRCEAEYSEKLDELKEAVAHAEQLPDTDKTKTKKLKTAKDKVAKHEREKADAEKEFFTQLRDNLAADVTSAASMRFIAKTGAELGLTDDEFAEAREAAKSVEPLGKQLIRLREKKGRPGRFEAAMFRYWLLHDGASGIEDGKNKLLKRAALREFRRFIEKDDPVDEPKLDGEPIRQMPFRGTANFAFLFFGKACLEILPNESTRSSPDRDFDKTAFATAAEDVFKYKIRTNVRMEKVRKLLHVVQAYESFSTPLELRVEDSPTGKRLTIHGLMNDPRWKGNGEESKGIEQLLKDLRKEEAGAYGLREGTIGGWAEVRKTLVDVHREAQRADGEISNEAELVKNLEKAMDDEMEANRQGFGSADLFHALCDPAYFHLWLGGADHEHNGVKDFLPHFVRYCEWREELIDLLIEKDGSAIERGVDMSSAKLAELAKRPIKYTWPGLLNRHKKPSYRYYDFAEQLNTALQFKSLFRRLRPSGESNRVARYEKLTGEKAKVTLAARRLKRDKLINKDTGNSVDALWCPPLILEGEATPKTANRPRAGKYDDAKKKVWPSGDVEVSYSLMAAPLPGDFWNEVAGVPSAGEKQPIHLTVSFKIEAEALAQLQQEGVHFVGKSLKGVDEEDDKRKFFRWPVDIESDKLAAKEAEEKSKHEAAKTGKETAKSAKRVDVKPTELWCHYEGGFRVKESHYSKAEKTTNTPDFHILSIDLGNRFAAAFSRLRIHAEAEGGGKGRVISADGFLPIIKAELVREGTMRLQGEDAEVWQLVTEKNQKHIAARLKARGENRKPVVGAYEWVEEKFGNGGRGRFPTADEYAAFAKLAARLVPVEAVSLIGKDKETYPELADHLIFRLKRKIGRLRTLLNLIWRLHGDKEKDGKGRYTVNRDHKKMRPVHYRMVMEMLARSAFPKRQRQPDEVEDRDDQNLRLKLASQDQWDEWRPLFESKKGKEENDRRQNLEAVALKYAPTKWLELAEAVKEQITDYCEDADSLDKLLVAVIEFCLPLRGRHWSWSYTENKARLSWGKDDEDPAWNPNIQGMRGLSMRRLDQILNLRQRCQSFAKLEDRYHRQFLKNDFNPPDSVPREEIDDVCPLLLERSNRIREQRVNQAAHLILAEALGMELKNPAEVENKNGRKNEVDLHGEYQRRKDKNGKPYPRCSVIVLENLERYRTSQERTRSENSRLMQWAHRAIIEKLEDMCRPFGITLMLVDPAFTSHFDSRNGLPGVRVNQVSRGFHVQYPYAKWINDKTKKGDKTSLALEIEKLIADFDAHPNYGGTLVLAVEGGKEFVPVMSPEGGESVVNADITAAANIGLRGVADPQRWDIFPRLRTKQVSDTQVRVTSWRGWFGKLMPEQRMMGKAVAGGVSELPAPAAKTKRKKADSEGAETGDKADSQSGQSSEYPPFFVEHPQHDWLPANDWLKKLALEFVQDGKKLRAYPQGAYLKRVELECTTRIEAINRARIQKWERGNDDVPM

SEQ ID NO: 1607 - protein, 1718 aa, unidentified
  REGION 1..1718: note = Cas Enzyme sequence
MPSELYRTYEVLIEESVHPTHPKRGKTNKTDGYKGEVHQALVTTNELFQDAVCYYTIMLAGLAGETKDRKSRLLNPLWKEFTQGKYKNQAEKVVRRFVGRYTTCAELTTPDSFYEKFLFSNELAKSMAEFNKAQTAADTYRVIEQQAVKTDEDGEIEESEALNVFANDWASILCDPDNETGVPGTGILDQMHRDILNDPATLDAAIDEAFQKASQWCRDSAEKKQQAKLAAMVKKRDEAIEKAKTEQTRIKKRDEWQAKIEKEQTDRSAAKEEQEKYTNNAFKTLRDALTDGLRYDEQKHGHTSESHAAIEATLQAVAGHISTATLSVNRIRYGSRDNSLEGVLLRYWWLHKHAASNATLTEEALDAARVTVKRDLEFYIADKTQTPKQPPKLNEQPITDAPFAASHKCAFPIFLKGVAGITHKDRSPWWEFDRTAFMYAADDVFKYKRRTQERQDRFNKLNFLVQMGEERDGIDELKPENSPTGKKLTVKGMKSDPRRSQLIELLQGLASDKGLDGKYGLRPGTIGGWADLRESFLNLEAKAKKQARVLTEDELIEAVDKCQEDNRQGFGDPNLFHELCDPDYHLIWSKAGQETEQAKANQIGDFVAYYVRFLEWKDEVLGLQELDGERKAKKDDKGHAILLPISYTFPGLENRHGEISQRHFNFKANLNEEFTFEKLFTKQESDGRNLYKLVELEDLRRVKLAARRLKRDKIMTVGGQSVNALWCPPLVFGLGHKPAAGKKKKDGADGKALKVSFSLVVDVEQSNDDWRTVHLKVQLPVSFTELNNTTRSEKKDWGGSFEWNKDAMGRFFRWPTDRLSKALATVAVLKSHPTWENQKQTIDTFLSRITGQATNAQGKALAKEIEEAATGVKDDRNKHLVESAVKALKGLGEKVWCQEIDNNPNILSVDLGNRFCAAFARVQVHRDGNAENRGRVISPDKEWITPIYAREVESGTLRLQGEDAWVWDHLRDGAGKCAKNSTGEYVYEKRKEKYGNNGRGRFPKADEIAKFKALADAILPIERTPIRAVETMTLPEMGDHLVWRLRRRISRTRNLFKLRWLVHPDSKKRNPNTGHYDQKFESKERGEQKSMVLQMLARSYTRPKREEDEKEDGVYELLRQKLATEAEWKSKFAEAVVETQPEAKGKLKSKKKSKDVIREVCRGWTIPEAKWNEFLGLLEDELAVMLDSQKLDSLLGQWRTISESSEGIRWEALRSSLESGRTNDGKFIYSLSSTSLLLCAVMEWCLPLRKRRWHWKAHEMRPKLFMGEHGPKDEDCEAPQHVPLIQGMRGLALRRLDQVLGLRQVCQSFAKIERRWLQPYHGVNDLVIKRDEELHDPCPDLLKKSNDLRDQRVFQTAHLILTEALGLQLKNPAKVERDGKTKKELKNEIDLHGDYECKQVNGQNVPRCSVIVLEDLSRYRTSQERTRSENSRLMEWAHRKIINKLADMAKPFGITLMLVDPAWSSRFDSRTGVAGIRVKEVKRGFENEMPFAAWRKRVKVSGKADELATLVEDMIEQFESIPKDAEKDKKRTLLIPVEGGERFLPAAPAKNGKETLNADKNAAVNIGLRALAHPDRLDIFPRFRTVKKADRTVKVRNKRGHFASLPEDDAGRELRGDWSIEKAPNAPTIEVEKSSGDDTGEVATESSEYPDYFAVLPGWTDFGVQCADKCYQGNDAVQQKLGDLIAYERPLFLKRVQQVCWQRIKDINAARCKSWQPK

SEQ ID NO: 1608 - protein, 1720 aa, unidentified
  REGION 1..1720: note = Cas Enzyme sequence
MPNELYRTYEVLVEESVHPDHPKRAKDKTNKPSRFNAEIDGALRDTHMIFQDAVCYNTLCFAGLAGMERHKSGERAGGLLNPLWQHLTTPASKGGIKEETEKVIRRLATHYKPLADITIADEFLNRVYSEPLRINSGMTEAERKAVLDLRARCYRILEMFGAPQKDNGGQECADMSAFANTWAGLTSKPESDTEIPGNLAYDCVSRELQAKLTDEMNEKEVVEVLEKTLLRYSQVAEERNKKDSEQKYLEELEELKNAICVAEKLPDTNETKARKIRSAKGVAEEFEKEKDQFIKKFFENRRTGLGRAVVSALGKPFATEKASDLGLSEAEFSAAKQHIARIAVATETIDKQHIRLHYKGGNPNNFEKAIFRYWLLRNDETSLDGNGKKTVKAAALADFRNFIKNDKPEKEPKLDEKHIAAMPFTAKGAKFAFQLFGKLCLGIETIHSSPDWAFDKTAYATAAEDVFKYKIRTDTRKVKVAKLLNVVQAYENKGTSLTAEESPTGKRLTVRGMDGDPRWKEDKEDCKGVVRLLAKMSQDKEISGYGLRAGTIGGWAEVRKALLGVYRKATKNGRDVNETQLTTDLEKAVDDEMEANRQGFGSADFFHELCEPAFFHLWLEDKEKDNEKDKDGNVIQKFEHNGIKDFIPHYVSYCEWREKLISLLMQDGGELEWKSEVELPATELRKLANRPIRYTWPGLLNRHKKPSYRYFDFAENLNTSLQLKSLFRRVRTESDPHGVPIYKKLDGDDAKLTLAARRLKRDKIVNKDTGNSVDALWCPPLILAGESEPTKEKYPRAGKYEDGKAKTWTKGDAEVSFSLIASPLPGDYWNEVAGVPSASEKYPVHMTVSFKLEANALALLQNEGVHFIRKSLKGVGEEDDKREFFRWPVDIETDRVAAQEAAAKDKKEAEKTGKPPKKQTRKPDVKPDELWCNYANGFLVKESRYIKAERTKRVPEFHLLSIDLGNRFAAAFTRLRIHADPKSDGRVVSAEGFLPVIKAQSVRQGKLCLQGEGADVWRLVSEKNKEHIATKLRAQGIKRDPVVGQYDLVEEAYGNGGRGRFPTDLEYKQQFVPVAEHLVPVSSLSLAGTNKQTYPELGDHLIFRLKRRIGRLRTLLNLIWRLRGTHERNNNIGKHDKQREDKDWLFHRRMTVETLARSKFPKRPRQEGEVEEPNDASLRASLASDDQWQKLKEHGLLDSVKGAAEKKRRQDLENALKQLGVWNWDKLADAVKNQIEENFSGNDSLDKLLVDVIEFCLPLRGRHWGWDRSRKARLHWDKKDETHNPNIQGMRGLSLKRLEQILNLRQRCQSFAKLEDRYHRQFKLKNYNPPDSIARELIEDVCPLLLERSNRIRDQRVEQTAHLILAEALGMELKNPSEVVNKKARKMAVDLHGEYKRRKDKNRRDYPRCSVIVLENLERYKTSQERTKTENSRLMQWAHRAIIEKLEDMCRPFGITLMLVDPAFSSHFDARTGLPGVRMNQVSPGFHEQYPYNKWVNDKTKTGKQTQLAKDIEAVKKLFADNPDFKGDLILAVEGGKEFLPVLSPDGGEGLINADICAAGNVGLRGVADPLRWDIFPRLRTKQISETEVSVTNWRGWFGKYLNDAEERRMRALATETAPAKAAATEKKKRRNSATNANESESPDSSDSQSGESSEFPAFFVAHPNHDWGIGLRDRAYRFVQNGKEILTYPQSAYLKRVEKVCSEHIIRINQDRIHKPPKA

SEQ ID NO: 1609 - protein, 1728 aa, unidentified
  REGION 1..1728: note = Cas Enzyme sequence
MGMNRIYQGKVTAVEIPDGKDEQGKPLIFHRDIDRARVLTERIPALRLKVEGEISERAKMSKEQRDQTQESAELKEYHALRAEQGKEWRAALWDHHQLFHDAVNYYAFALAAMAEGMVEIDDFGKAVKDDKGQEKKTAMAQFAEQVFGNQKPKTDTNYIEGRWEDFTHKGTRREGLKHSLSRTLGLDPKTVTREQCIERILGDALKKFSSRKDAEGRDVFHGVISELFPAKSRGTPKKLANEDPGWLCWKDKTGEPPAEKTYRNQQGIYDFMAELFSADAASMKKLAEKSVLETCLSGVTKAKASDEEDVSENEEADNSDADEGGETDEKTEAVKCFTGLAAINQLRKCVRTAKTLLLDSEFKRDFDLLGGGRFNARGELARLLKCVRRLKANATESPESLKFQEWKRNGDGKDNERVELFVLLHFAGKHYPDVIEFAGALLMTRLKRRLLGAFRKNSPKQYLDFVQRFGLAGSEADGKESKKQIEIATRAVDRQARGETKLLPKKTKFIPRIRKAVGYVFPSFTTIRGFIAQADAPAEANGACTHGHLGWPKFDNSAYEEAIKSPHQIREKQKERDKEKGKLETLKELYEGKGREKGKDDDGEDEDHIPGFKGDPRFDAMKRIHAAMAVADGVSEGKLHEYGISQAALRGYEELREDWSKVVGFADEFTDERAKKLKERLVTHQQQHRDDMGDSRFFEQLIKQENWCVWQAASKEVDEERIKNRHSTNIVRDYLRYSDVLDDLEKKKRPIQYTPADASESRRLFDLKAASKGAIKHFGCPDGLSFTTQIAVKSCDQPNRLYRPQEIRIHYTAPRLLRDEARALAENEKLESANWAQPMMLALGVPDDSRHNFEEHAVSLMPDWKPGSRSPEPDRLLLNFVLGPKEEKFVAHLRKEMKREPWPWTMQFNWNGDGHDSTLRWHREDWSKVKTKKEFPGQWFASASVKSFRLLSVDLGQKQAGAYAIIEVSCCLSDDEKKNARFIGMTEHGGEHHDWYARVLTTGLHKLPGEDAVVFRSVTELDKQRASARGKATPTGDAFREELSGSAGRIATKDESRKAIDLLTELDQLALLDEDPAKAAVECERLTFPLQNTKLLIALRRAQSFASKLHRWCWFLDPQDEKAREDQPVRRRTAIKEIAEADNHQWLDDKTREMAKARHAILGDAKEDPELHPEIVKALKDRLEDLVKKLPRWLEVIANRVYSSRRGQLVWRNHPEPGMERCHLLDFSLRTKEERDKLTKDEQRLGGQRGLAMERIEQLEELRKRCQSLNQMLRRDIGGKPPLSRDDSIPDPCPTILAKLDDIKEQRRNQTAHMILAQALGLTLAAPTEPKNDTEREMREAKDSHGEYVKVDAKGRPIPADKPESWRGLVDFIVIEDLSRYRTTQGRAPRENSRLMKWCHRAIRDKLKQMCEPFGVPLVETPAAYSSRFCSRTGVAGFRAVELSGDPLTESKWRWRIRKPEEGKKESDDQIKRRERWELLFSQVQKANLGRDGKSKGQELRTLLVPDAGGSIFIPISGLNEAYERPAKNSTNPKLHRPIIEFQPVKLEDNQWKQPRLIHADVNAAVNLGLRTVADPQLWSVHSRLRSERKFGTPPKPKPKTVRGKDKTPEPMQPDTFWVSEKEKRKYGEQTDEKRIEIKLLDAKKANLKASDSRHPNFFNDVADLKTWIHDGAATLEGLPVGCSRPPHLVSSKALWGYIKDQAWQRCIAINAARLKAWGIDPPKEWKT

SEQ ID NO: 1610 - protein, 1789 aa, unidentified
  REGION 1..1789: note = Cas Enzyme sequence
MVLSGSLRQAQGKVSLTPRFNGVVEGRNWGGNLFPTVSRTETAEAVTTTRPPRPIRPIRPTRRTKLRFNPRPAQARKAPKMFSPCVWVGATISQKSTTSNLGMNRIYQGKVTAVEIPEGKDWKKLNDGNWRTVLWRHHELFQDAVNYYTLALAAMAGGFGRDDPKSRENEIKQLDNKLESLVERTKKAKKAKDEAALEDVAKQKQQAETTKDRLQREEAVWQWREQVSKAFKEGVKRKGQTILWETETFARVLKKLEPGFTAVNDFEACCETILKPSKASPQLRSSALLRLLTLAAKKKGEASAALTPLCTDKIVWFCSAPEDLDATDDVEKSAAEKAAWEFSKQLDVAKDNELEALAAKLKPAVFMTRERGEVLKGKDAISALLSYFKQLQQNSPGLKAARATVAQKIRMIRAIEKNEEASMPFTFQLPKARVGLDYKAAKVFKVIPHAALAAVFRKQTETLAKKKTVEVLDCDPLKDARTKANQPQFDYFSNLAFIAAAKADKKQTKKRRVIIDENEDDDSDENRANWFEFDLLAFVEALKSPHRYLQDTVKRREECDRLQKRLDAMRGGGEEESGEGDDESSEKLSGFKGDYRIGLPGDADSVKKGVFQLIHDEELLAYREEDESSETEDEEPDSVQCPACGGRCHGYGINQNTVRGWRELRQKWREAATKPEFSGEANQKKLLDDLARIRREEQGDRPEESGSGPLFKRLELPQYHCIWNDKPPNPSNAEDPLWEWVRYRELHDELEKTKKAIRFTPAHAVESPRFFIFPKQNRKKSTAPKRGDATAGRRTDHLPGMFGFNDEKKLVEVKGDEAWLKDRPRFMAVYAGLILGEYPKLQPRPVRIIFSAPRLRRDRIRADDENSLGSVSLLQPMMEALGVAREELPEINFANCPMTLLAERRKRPDELAEDESDEEQKKPDCYDLNLSFPVTLEESTLKEHKLFQHAKRWTLQSYRKANAKIERHAQFQFSGDDEMREIAIRWPVDREHSPRKSDEAPAWYETMNRFSCLSVDLGQREGGAYALLDARANGDFGKNKGGKPVASRFIGQTGEKKWRAALAASGMLKLPGEDKRVFRPKTLASHAKPSPDDRNPEDAIHGKKFREELWGDAGRPPLRSTDPGALIDETEQARGLLGKDGFDQLDIMPPGWDKRRGNGNWSEPNTELSFPEQNDKLIVAARRYLSRIRRLHRWCAFLNSENWREKPEKAKQKRERALQEIREACGLDENSVAKHDEEANAPLKEEAWLAPSVKRFVESGADDSGLTEVLKTLLELMLAKLSEQFVIMANRCAPLRGRSWRWTKHAKSTDANPLRILLPTGNAKPNALMKMPDGTERKVTWIRGQRGFSMKRIAQLEDLRRLFQSLNQIQRRKIGTMPPCRKRGEKGDELPDCCPKLLEKLDELKEQRVNQTAHQVLALALGLRLKKSGPTKSETERKHSDIHGEYERVPDASQPEGFRHPVDFIVIEDLKYYETTRVRSRRENVRLMRWCRRHFRDKLKQLCDVFGFPVVEANPANTSKFCARTGVAGFRAVEVGPGFHEEYVWRKALEKLDKYRKDKKKNPLKPDDLAFCEGAEKLKQQVEKAQKIPTKSGNSLPCPRTLLAPLGSGNVFVPIVGAMDGTDLPPAVVQADVNAAVMLGLRAMADPQLWEIHPRLRTKPPEKEKKSKRGKKGEPEAPRKNPDEKRFPPDLFAAEKRKFGEKTIKLDLTNASEDGAIKDSRKPNFFCDLAGLAHWDKTVIPDPKTDRPISLPSGKALWSAVKAAQWKRVDELNQARIVAWQNKANAMPD

SEQ ID NO: 1611 - protein, 1811 aa, unidentified
  REGION 1..1811: note = Cas Enzyme sequence
MSAIHRSYEVLIEETVSAENRAQRKHGTSKPLNHNTKTTEALRLTNDLFQDGVCYYTIMLAGMVKDACWTDELLESATWMKEKIDAEQWKVRKAQLLGKRINPLWELIRSSATSANVVGRLNQNWYRHAIFFGAKTAEELVAKAFCYQGEERLSGKSRTEKRRNNSPTKEMLLHTFVKSLLCDAMQFKASKVALKDMASFAGIWSGYLCTPAGSNNPKGTGIYDRLHSKLRTLADNSDLGRTWQSLKNDLLRLGKDAKEARKESEQKIKQARAAILDNERLQETIIEAVEAASKERAKANESLRDAELNTAVKAALESIERDPQETDEAIRQRIKNEINKRVEPKQGTALETYRKAFEEAKLADCIKPHLATLRGELADASANDARIKRLQEDGKKDQGPFTQALYRLLWVTGRAELEKLAAADVLAYVLDTEPCVEITTLPYQEQINEPLFPFFTNSLAKDATTALQADDQVVWDAFDTAAFKRAATEFFKYANLTQERQKKIDSFNNDIKDFRTTGRRSTTQPKKRKPKKNAPASTDMQLPKQRFAIFGMEGDDERKSRMEDVLKNLGESGYVLRRSTIGGWAYLRPELLKTYKQAKESGLDADAIVDKLFGKLKEIRDKIGSGFGDPNLFEAICETDNHVLWLDTWPNKKEWHASDFVLHYTRYSSKFEDLREIADAPVTENGQWTPKPINFTWPGEEHSGKKEPSYRPFDFKCDIREKPEIKLFAKNEVADGLQIIESNSKKHPDFPLTLSFRRLKRDRIVLPDGTSLESFFSPPKLVNENVEPPPLAGPRVRPADIDHKRLDSFIAGLKQTSTESARLLAASRQRLLDRGGKWIEFKEQADKNTIKKEVDEAKKNAKEIRDQIVELLAEELTKHVIASAALYKLEELKPSERKRIQESPNGLEHQFQNRKCLANTLKNFLKPPARNYRENVSLLAPKHANGAFHFMFAVEVNSSDLVGFQVPPVPGDKPFRLTKQGETKVAAYLRWPVDLLSEAAAIKKLKEKATVQNTNNGVSDDDDDDEGKGKTNLPKADKLWMASEEFKQLGIHSLFVDLGVRFAGAWSRAWLRDAHGQQSERAQIISPPKDHPEYKGDIWCQLYDEGAFRLQGEDAHVWHRPKGGQWTYQRELYGSRGRLASPEEIQRLFLGENGEKGLAERLFPSTNRIKLPEDGTDARRFIPAIAEHLMTRLDRRLSRIGFLFTLRWHLEGQKERNPATGLFEIQRIASTHQPGHCRAVVEALASAKLRPEGEDAEEIGWNTELRELLADVETWEGIKTWLKKPRRKNQRNEHDNKFAKAVYEDKRWQWAKLAEAVHQQLGLLLGELGDSSDRSLLAQIADLAWPLRDKVWHWQSHRIDLAGKPIPSKLLRVQKNSAIKGKIIGQGGLNMIRIELLQRLRRNCHSLARHEARFALGRIPGAVGVEPPIFERGQAGEPCQDLLDKINELRDQRVDQAASLILAEALGLELQNPSEVSIDGLRKWQLKSDRDVHGRYQRRKVNPKKAAELGLSADKALVPQCSIIVVEDLSRYLTSLDRSRFENRRLMDWSHRAIIKKLKDMAQVFGIELVAVDARYSSRYCSKTHVPGIRVAEVNRDFEKEQPWRRWKEEKTKSKLTERANQISNLIGEFEKHPNYNGTLLIEMEGGPLFLAANGESAVNADINASKNIGFRAIAHPDLWHFFPVIRTEADEDGKLRIINRRGTLAAREENDIARLADPLIKPKEEKPNEAAEADSNEEENETSERPYLFVPGQVEGSYLELAETEDTFLARIYPSQKSPLRVAKGKYFWSLVTAKSRAQIKFINQKRIDG

SEQ ID NO: 1612 - protein, 1817 aa, unidentified
  REGION 1..1817: note = Cas Enzyme sequence
MNTIHRSYEVLIEETVSAEERQRRKHGTSKESRFNLKTSGALELTNEMFQDAVCYYTLMLAGMVKDALWSEETFGYAKWMEDKLKTKGWQARQAQLTGRPINPLWNCLTNSVEMREATANVVKRLAEGYPHAIFHGAKDAGDLVQKAFCYQGEDRSTDGTRREKRRGQSPAQLALVKTFVQNLMAEAVNVSGKADALNDMASFAGVWSGHLCNPSGRSRPKGTGIYERLHTELRKLVNQSENGRRWIESEQALIAAVQAKDTPERRKQLRTAVEAAWVSVICDPVLLTKVCERVQELAESRAAENAKIDDSELRREITKALKSQDRKPTDTEEIIRERVKKEFDRKAKNAQETALGAFRRAFNQPRHAEKLKLTPHLSSLRQEIASAQIDDKRLQRLQERSKKDAGEFMEILCRLRWVSSRSDLRVLAASDALAFVIDNEPSESTEDKLPYQDSAGEPLFPFFTNSLGLCVQKQVVWDTFDTAAFKRAAEDVFKYTNRVAERRRKIEGLKTEKDLFDGKGRRSEKQKKDGKPRFAIFGMEGDDERRKRMEEVISELGKDRASGESGYGIRSSTIGGWTYLRPELLKTYEETKNKDKLEECLLDAVEKVRSQSGGRFGSADFFYALCREENHILWLDDWEYRKKQEWHAPDFVAHYARYSRKLEDLRDIAEENENWKPKNINYSWPGQLHFRKKERSFRPFDFKCDIRTDPKIDLFSRNDAGQIHRVTTNQAAKGKTLEFPLTISFRRLKRDRITDGAGNSVEAFFAPPKLAAQGSPQPPVLAGPRIRPDDIKAKELDAFLEDFTSDKMPEAAKLIQGLADELKQHHLEIQRLTKDSLTSKKSQKDLPQQRRTVVALLCNKLNRLISSKQALYAKEKLSRQEQKRVDEEPLGLEHRLQNRRAIQKTFGGFVKDVSQCYNEAVSILAPKRPGGAFHLMFAVELDEADLKDFRVPAIPAQQFQDAKQGETWVRAHLRWPVDLRTEAANRKRKGEKAKEVDEDVLTPEDDDPNAKGRPVLPEREELWCAPKNLEKPVHALFVDLGVRFAGAWSRARIRQAEGAKPETAHVISPPKGHSDYQGEIWCEFYNEGTFRLQGEDAKVWHRPKGGDYEKENSRFSRQEVATLDENGQQQWPDTSREKGGWRYGRELYGSRGRLATPDEITKHIKLAESLFPSTNRFPLPAENSDAARFIPAMAEHLVARLDRRLGRINFLFNLRWRLEGTMEQDPTTRQFTRPRDENVDTPKHRRMVVEAIAPAKLRPDSDDAEEIRWNDELRSKLTNDWEDTKGLLQKPKRRKQRQEHDEEWDEKITRISKEKEWKWEQLADAVHTQLVLLLDELGVAGETGLVAEVARFVWPLRDKRWHWRKHTIHANGEVCPSLLSTEPLPNDSEKRKIIGQGGLNMQRVETLQRFRRCCQSLAKHEERLTFGRIPGQKGLEPYIVPRGDSVHDPCPSLLEKINELRDQRVDQTAALILAEALGLELMNPADVSIEGLRKSQLKSERDVHGRYQRRKLKLDGKEADAPQCSLIVVEDLSRYLTSLDRSRFENRRLMEWSHRQVIKKLKDMAQVFGIEIMAVDARYSSRFCSKTHVPGVRVAEVKRDFEKEHPWRKWHDEKFNGKLTKRAERVRKIAKEFEKNPNATLLIEMEGGPLFLDCNGEEPRNADINASKNVGFRGVAHPDLWEFFPVVRTETATDGKLRVINRRGTLAGLNPDDAKREFAPTVPKKETKTKEGDSTAANDDDESETSERPYLFVSGAPNGERLPLADGEEVFEVSAIADGKTGYRTARGGLFWRRVADECQRRIDEINKKRLNKLIPG

SEQ ID NO: 1613 - protein, 1822 aa, unidentified
  REGION 1..1822: note = Cas Enzyme sequence
MSTIHRSYEVLIEETVTSENREQRKHGTKKLLNHNTKTTEALRLTNDLFQDAICYYTMMLAGMVKNATWTDDLLESANWMKEKLDAEQWKVRKMQLVGQKINPLWNLICSSGTTSNVIGRDRLNRNWYQHAIFSGAKSADEFVAKAFCFQGEERLLGNSRKKRRRKNPPDDELLLRTFVGFVLRDAMQFKAGKLALKDMASFAGVWSGYLCTPAGSNNPKGTGAYDRLHLALRTQIDNSDLGRKWRKLHDDLARLGKDEKVLRKETEQKIKQARADLLDDENLQSAIIEAVKKAATDREAINENLRGTEFKIVVQAALASPKRNLQETEEEIQKRIRNEFDRRFLAKQETALETYRKAFQEAKLADRIKPHLASLRSEIASAVSSDTRIKRLQEDGKKDQGPFTQTLYRLLWAVDKAEVENMAASDVLAYVIDTEPVRVTSDTLPYQEQMNEPLFPFFSNSLAKDAANLMQPKDQVVWDAFDTAAFKRAAEEFFKYAIRTQDRQKKIDGLCNDLKDFLTAGRYSLNQPKKRKAKKSANVSADTERPKPRYAIFGMKDDDDRKQQIEKILDKLKTDRGSGESGYGLRGSTIGGWAYLRPELLKTFKQGKESGADESKIEEQLIGKVEEIRSKTGGGFGSADFFYALCETENHILWLDTWPNKKEWHAPDFVLHYARYSSKLEDLREIADAPATEAGQWTPKPINFTWPGEEHSGKKEPSYRPFDFKCDICEKPSIQLFAKNEAADGLRIIETNSKKYPDFPLTLSFRRLKRDRIVLPDGTSLESFFSPPKLVNGSVVPPPLAGPRIRPADIEEKRLESFLEDLKQSSSEAAKLLAAIRAELLNLGSELAKIKSQADQATNNKDKNEAKKAAYEKQNQIAERLAEELTRLITGNVAFYKAEDLNTNEQKRIQESPTGLEHQFQNRKCLVKMLKGILGSASRNYRENVALLAPKRANGAFHMMFAVEVNSSDLVNFRVPSVPGEKPFRLTKQGETKVAAYLRWPVDLLSEAAAIKKGKVKATQQNETTDTTDDDDDSKGKASLPKADELWMASTEFKRNGIHVLFVDLGVRFAGAWSRSWIREATGKRPETAQLISPPADHPEYKNDVWCQFYEESTFRLQGEDAHVWHRPKGGQWTYQRELYGSRGRLASPEEIKIVFDSESEDKGLAEQLFPSTNRLKLPEEGTDAHRFIPAIADHLMTRLDRRLSRIGFLFTLRWHLEGQKERNPATGRFEKERIQKDDQPGHYRAVVEALASAKLRPEGDDAEEIGWNTELRESLATEETWQSIKPWLVKPRRKILRNEHDGKFAKAVYEDSRWQWTKLADAVHQQLGLLLGELGDSSGKSLLAQVADFAWPLRDKVWHWQSHRIDSAGKQLPSKLLRVAKKNEIKGKIIGQGGLNMTRIELLQRLRRDCHSLARHEARFALGRIRGEVGVEPPVFERGEAGEPCQDLLDKINELRDQRVDQAASLILAEALGLELQNPSNVSIDGLQKWQLKSDRDVHGRYQRRKLNPKKASELGLPVDNSFVPQCSIIVVEDLSRYLTSLDRSRFENRRLMDWSHRAIIKKLKDMAKVFGIEIAAVDARYSSRYCSKSHVPGIRVAEVKRDFEKEQPWRRWKDEKAKGKPTERANQITKLIGEFEKHPKSKYDGTLLIEMEGGPLFLAFNGEAAVNADINASKNIGLRAIAHPDLWHFFPVIRTESDEGGKLRIINRRGTLAALDEDNPERLASPLIEPKEKTSENVEADSDDEENETSQRPYLFVAGQPNGSVLELAETEDTFSAKNYPAAKSSWRVAKGKYFWSLVISKCRAQIDSINQKRIAEKEP

SEQ ID NO: 1614 - protein, 1852 aa, unidentified
  REGION 1..1852: note = Cas Enzyme sequence
MSKIHRSYEVLIEETVTSENREQRKHGTSKTLNHNAKTADALRLTNEMFQDAVCYYTLMLAGMVKDARWSEETFSYAKWMEDKLKAKGWQARQKQLIGQPINPLWQHITNSVEMRDATANVVKRLAQDYPHAFFHRAKDAEGLVQKSFCYQGADAATSESKRRDQPPSDSAMIRTFVAHLMPQVVEVKNGGDSLQPQKIKSFASGAIADLCNPSSQAKNLVGFYDQLHQKLLALVGKTEAAKKWQQATEKLDEVKQRKVEKAERDSLREAEKAAQLALFEFVAKPGPLHDELVLCVNAIAKKRADESVSLRDHKRADAVSTALKEAAANPKRKPDDTDDAIRNKAEKSTAEDWAKMISATKDTYRDAFLDTKTARHLATDLSKLREQVGAANKDDPRFRRLQELGAQGVKRDDKAISKPLYRLLWIVGSPEHNGELRRKAAADVLEFVVSNKPAEALGDSDRMPHQQFKGEPLFPFFTNSLGLAPDDQCVFKVFDIAAFKRATEDVFKYANRVAERRRKIEGLKTDKGFFDGKGRLAEKQKKDGKPRFAIFGMEGDDERRKRMEEVISELGRDRASGESGYGIRSSTIGGWPYLRPELLKVYDRQKALRDRLEKRGKLNEEKEEKLEEHCETRLLATVDKARSKSGGGFGSADFFYALCREENRILWMDDWEDRKKQEWHAPDFVAHFARYSKKLEDLRDIADETENWKSKSINYSWPGQVHFRKKERSFKPFDFKCDIRTQPSIELFARDGAGQIQRVTTNKATKGKTPDFPLTLSFRRLKRDRITDGAGNSVEAFFAPPKLAARGAPQPPVLAGPRIRPDDFKTKELDAFLEDFSNGRMPGIEKLIQHIADELKRHHLEIQRLTMESQTSKKALKQLPQQKRATLALLCTELNRLISDAAPLYVTEKLSKQAQKRIGENPLGLEHRLQNRLAIQKTFGGFVKAISTFYNEAVSLLAPKQSGGAFHFMFAVELDEADLKDFHVPKIPGEQPFRRTKQGETWVAANLRWPVDLKTESEDRIRKEEKAKKVAEDIHAIADEGDDGKKPSELPKREELWCASTNLENHALFVDLGVRFAGAWSRARIRHAEGTKPDTAHIISPPKGHPDYQSEIWCELYSEGTFRLQGEDAKVWHRPKCGDHAKESSRFSRQEIPKLDENGEPQWPDASKEKDGWRYGRELYGSRGRLASPDEIAKFKELAEKLFPSTNRFQLPAENSDAARFIPAMAEHLVARLDRRLGRINFLFNLRWRLEGTMEQDPTTRQFTRKRDEKVDEPKHRRMVVEALAPAKLRPDTEDAEEIRWNDELRSKLTDDWEDTKGLLRKDKRRKQRQIHDAEWDERIAKISKEKQWKWEQLADAVHTQLSLLLGELGVAGENGLVAEVARFVWPLRDKRWHWRKHTIHANGEVCPSLLNTEPLPKDSEKRKIIGQGGLNMQRVESLQRFRRCCQSLAKHEERLTYGRTPGQKGLEPYIVPRGESVHDPCPDLLEKINEMRDQRVNQTAALILAEALGLELMNPADVPSLEGLSKAKLKSERDVHGRYQRRKLKLDGKETDAPQCSLIVVEDLSRYLTSLDRSRFENRRLMEWSHRQVIKKLKDMAQVFGIEIMAVDARYSSRFCSKTHVPGVRVAEVKHGFEKDHPWRKWHDEKFNGKLTKRADRVREIAKEFEKNPKATLLIEMEGGPLFLGCNGEKPRNADINASKNVGFRGVAHPDLWEFFPVVRAETATDGKLRIINRRGTLAALKPDDAKREFAPTAPKKETKKKENASGATGDDDENETSERPYLFVSGKPKEYVLPLGKDENIFDLSPIHNADEANLYRTARGGLFWKLVGNQCRERIDEINKERLKMLNSP

SEQ ID NO: 1615 - DNA, 36 bp, synthetic construct
  source 1..36: mol_type = other DNA
atctacaaaagtagaaattgaatataggtattagac

SEQ ID NO: 1616 - DNA, 36 bp, synthetic construct
  source 1..36: mol_type = other DNA
tctacaacagtagaaatcttatagacgtattagact

SEQ ID NO: 1617 - DNA, 36 bp, synthetic construct
  source 1..36: mol_type = other DNA
atctacaatagtagaaattacaaatgttttatagac

SEQ ID NO: 1618 - DNA, 36 bp, synthetic construct
  source 1..36: mol_type = other DNA
gtttaataaccctatataatttctactattgtagat

SEQ ID NO: 1619 - DNA, 37 bp, synthetic construct
  source 1..37: mol_type = other DNA
gtgtccgtcacctcgcaatgccacgctcgcttctggg

SEQ ID NO: 1620 - DNA, 36 bp, synthetic construct
  source 1..36: mol_type = other DNA
ggctatatgccaatataatttctactattcgtagat

SEQ ID NO: 1621 - DNA, 36 bp, synthetic construct
  source 1..36: mol_type = other DNA
gtcgctgtccttggaaccaacctgatcaacggacac

SEQ ID NO: 1622 - DNA, 37 bp, synthetic construct
  source 1..37: mol_type = other DNA
gtcttataagctttttggtactaaaaactattgggac

SEQ ID NO: 1623 - DNA, 36 bp, synthetic construct
  source 1..36: mol_type = other DNA
atctacaatagtagaaattaattgcggcttatagcc

SEQ ID NO: 1624 - DNA, 36 bp, synthetic construct
  source 1..36: mol_type = other DNA
gtctaatatcaatattcaatttctactttcgtagat

SEQ ID NO: 1625 - DNA, 33 bp, synthetic construct
  source 1..33: mol_type = other DNA
gtctagaagtctttactttttatatgggtattg

SEQ ID NO: 1626 - DNA, 36 bp, synthetic construct; identical to SEQ ID NO: 1621
  source 1..36: mol_type = other DNA

SEQ ID NO: 1627 - DNA, 36 bp, synthetic construct; identical to SEQ ID NO: 1624
  source 1..36: mol_type = other DNA

SEQ ID NO: 1628 - DNA, 36 bp, synthetic construct
  source 1..36: mol_type = other DNA
gtttaataccttaattaaatttctactattgtagat

SEQ ID NO: 1629 - DNA, 36 bp, synthetic construct
  source 1..36: mol_type = other DNA
gtgtcagttgatcacttggtcggcgacgtcgccgac

SEQ ID NO: 1630 - DNA, 36 bp, synthetic construct
  source 1..36: mol_type = other DNA
gtctgaaggactctataatttctactattcgtagat

SEQ ID NO: 1631 - DNA, 34 bp, synthetic construct
  source 1..34: mol_type = other DNA
ccaacaacgttgccttctaggacttcgttgcgcc

SEQ ID NO: 1632 - DNA, 39 bp, synthetic construct
  source 1..39: mol_type = other DNA
aatctacatttcagtagaaattattattccttatagcca

SEQ ID NO: 1633 - DNA, 36 bp, synthetic construct
  source 1..36: mol_type = other DNA
ctctacaactgataagtaatttctacttttgtagat

SEQ ID NO: 1634 - DNA, 36 bp, synthetic construct
  source 1..36: mol_type = other DNA
atctacaagagtagaaattttatgaagcttctaggc

SEQ ID NO: 1635 - DNA, 36 bp, synthetic construct
  source 1..36: mol_type = other DNA
atctacaatagtagaaattaaatcaagttgttaaac

SEQ ID NO: 1636 - DNA, 36 bp, synthetic construct
  source 1..36: mol_type = other DNA
atctacaatagtagaaatttaaagggattattattc

SEQ ID NO: 1637 - DNA, 36 bp, synthetic construct
  source 1..36: mol_type = other DNA
atctacaaaagtagaaatgtactatctgtatttgag

SEQ ID NO: 1638 - DNA, 36 bp, synthetic construct
  source 1..36: mol_type = other DNA
atctacaaaagtagaaattgaatagatcaatttgcg

SEQ ID NO: 1639 - DNA, 36 bp, synthetic construct
  source 1..36: mol_type = other DNA
ccgcctcaatctctttggagtcacgggtactgcgac

SEQ ID NO: 1640 - DNA, 36 bp, synthetic construct
  source 1..36: mol_type = other DNA
atctacaaaagtagaaattggatatacctattagac

SEQ ID NO: 1641 - DNA, 36 bp, synthetic construct
  source 1..36: mol_type = other DNA
atctacaacagtagaaatttatatagcctattagac

SEQ ID NO: 1642 - DNA, 37 bp, synthetic construct
  source 1..37: mol_type = other DNA
ccgcctcacgattcctgaattcgcgccgactgaagcc

SEQ ID NO: 1643 - DNA, 36 bp, synthetic construct
  source 1..36: mol_type = other DNA
gtcaaatagtaactaacaatttctacttcggtagat

SEQ ID NO: 1644 - DNA, 36 bp, synthetic construct; identical to SEQ ID NO: 1621
  source 1..36: mol_type = other DNA

SEQ ID NO: 1645 - DNA, 36 bp, synthetic construct
  source 1..36: mol_type = other DNA
atctacaaaagtagaaatttcatatatgcattaaac

SEQ ID NO: 1646 - DNA, 36 bp, synthetic construct
  source 1..36: mol_type = other DNA
ccgcctcatgccgactgaaatcacggggagtgcgac

SEQ ID NO: 1647 - DNA, 36 bp, synthetic construct
  source 1..36: mol_type = other DNA
gattgatactccttagtaatttctactgtcgtagat

SEQ ID NO: 1648 - DNA, 36 bp, synthetic construct
  source 1..36: mol_type = other DNA
atctacaaaagtagaaattgaatatctatattaaag

SEQ ID NO: 1649 - DNA, 36 bp, synthetic construct
  source 1..36: mol_type = other DNA
atctacaacagtagaaattataagggtttattaaac

SEQ ID NO: 1650 - DNA, 36 bp, synthetic construct
  source 1..36: mol_type = other DNA
atctacaatagtagaaattaaacttaggatttaaac

SEQ ID NO: 1651 - DNA, 40 bp, synthetic construct
  source 1..40: mol_type = other DNA
cggctgctgatggctgcgaggagagactggtggcggcact

SEQ ID NO: 1652 - DNA, 36 bp, synthetic construct
  source 1..36: mol_type = other DNA
atctacatcagtagaaattcgaaatgagttttggac

SEQ ID NO: 1653 - DNA, 36 bp, synthetic construct
  source 1..36: mol_type = other DNA
atctacaatagtagaaattatccaagtcctatagac

SEQ ID NO: 1654 - DNA, 36 bp, synthetic construct
  source 1..36: mol_type = other DNA
gtctaatacgtctataagatttctactgttgtagat

SEQ ID NO: 1655 - DNA, 36 bp, synthetic construct
  source 1..36: mol_type = other DNA
gattaataatccctaataatttctactgttgtagat

SEQ ID NO: 1656 - DNA, 36 bp, synthetic construct
  source 1..36: mol_type = other DNA
atctacaacagtagaaatttgccaaagcctttagac

SEQ ID NO: 1657 - DNA, 37 bp, synthetic construct
  source 1..37: mol_type = other DNA
gtgtccaagcccgctgttgtgaggaggaaatttcctc

SEQ ID NO: 1658 - DNA, 36 bp, synthetic construct
  source 1..36: mol_type = other DNA
ctccaatgataattatgaatttctaatatagtagat

SEQ ID NO: 1659 - DNA, 36 bp, synthetic construct
  source 1..36: mol_type = other DNA
gttaagtaacctatagtaatttctactgttgtagat

SEQ ID NO: 1660 - DNA, 37 bp, synthetic construct
  source 1..37: mol_type = other DNA
gccgcagtcgccgcgacttcaggaatcgtgaggcggt

SEQ ID NO: 1661 - DNA, 36 bp, synthetic construct
  source 1..36: mol_type = other DNA
atctaccgaagtagaaatttctgaggagttctagct

SEQ ID NO: 1662 - DNA, 36 bp, synthetic construct
  source 1..36: mol_type = other DNA
gtctataagactaatttaatttctactattgtagat

SEQ ID NO: 1663 - DNA, 39 bp, synthetic construct
  source 1..39: mol_type = other DNA
gtgtccatcgatcagggccgcgtcgattggtgcggcggc

SEQ ID NO: 1664 - DNA, 36 bp, synthetic construct
  source 1..36: mol_type = other DNA
atctacaatagtagaaatttattccgtctaatagac

SEQ ID NO: 1665 - DNA, 36 bp, synthetic construct; identical to SEQ ID NO: 1621
  source 1..36: mol_type = other DNA

SEQ ID NO: 1666 - DNA, 36 bp, synthetic construct
  source 1..36: mol_type = other DNA
atctacaatagtagaaatttactatggatttacacc

SEQ ID NO: 1667 - DNA, 37 bp, synthetic construct
  source 1..37: mol_type = other DNA
agtttaatcaatatattcaatttctacttttgtagat

SEQ ID NO: 1668 - DNA, 36 bp, synthetic construct
  source 1..36: mol_type = other DNA
atctacaacagtagaaattattagggattattaatc

SEQ ID NO: 1669 - DNA, 36 bp, synthetic construct
  source 1..36: mol_type = other DNA
gtgtccgccgatcggctcatttccgacgtctgccac

SEQ ID NO: 1670 - DNA, 37 bp, synthetic construct
  source 1..37: mol_type = other DNA
agtttagaacccaaataaaatttctactgttgtagat

SEQ ID NO: 1671 - DNA, 35 bp, synthetic construct
  source 1..35: mol_type = other DNA
gtcataatagcttttgaaagattttatgtgatggc

SEQ ID NO: 1672 - DNA, 39 bp, synthetic construct
  source 1..39: mol_type = other DNA
tggtgtaaaagcatataaaatttctactattgtagatat

SEQ ID NO: 1673 - DNA, 36 bp, synthetic construct
  source 1..36: mol_type = other DNA
gtgccagctatccacaattgatcgattaggaagatc

SEQ ID NO: 1674 - DNA, 38 bp, synthetic construct
  source 1..38: mol_type = other DNA
atctacaacagtagaaatcttatagacgtattagacac

SEQ ID NO: 1675 - DNA, 36 bp, synthetic construct
  source 1..36: mol_type = other DNA
gtttaatacacccaagtaatttctactattgtagat

SEQ ID NO: 1676 - DNA, 36 bp, synthetic construct
  source 1..36: mol_type = other DNA
atctacaatagtagaaattacataaggcttatagcc

SEQ ID NO: 1677 - DNA, 36 bp, synthetic construct
  source 1..36: mol_type = other DNA
gttttgagaaccttaaaaatttctactattgtagat

SEQ ID NO: 1678 - DNA, 36 bp, synthetic construct
  source 1..36: mol_type = other DNA
atctacaatagtagaaattatatagggttattaaac

SEQ ID NO: 1679 - DNA, 36 bp, synthetic construct
  source 1..36: mol_type = other DNA
ggtgccgacgtcggcaccaacctgatcgacggacac

SEQ ID NO: 1680 - DNA, 36 bp, synthetic construct
  source 1..36: mol_type = other DNA
ccgcctcatgctccctgaaatcgcgccgtctgcgcc

SEQ ID NO: 1681 - DNA, 36 bp, synthetic construct
  source 1..36: mol_type = other DNA
ggcgcgcaggccagcgcgccaatgatcgactgacac

SEQ ID NO: 1682 - DNA, 36 bp, synthetic construct
  source 1..36: mol_type = other DNA
gtctaaagcaccaataaaatttctactattgtagat

SEQ ID NO: 1683 - DNA, 36 bp, synthetic construct
  source 1..36: mol_type = other DNA
atctacaaaagtagaaattaaatatgggtattaaac

SEQ ID NO: 1684 - DNA, 36 bp, synthetic construct
  source 1..36: mol_type = other DNA
atctacacaaagtagaaattgttataccttcaaaac

SEQ ID NO: 1685 - DNA, 36 bp, synthetic construct
  source 1..36: mol_type = other DNA
gtctgaaggcctaaaggaagctgaatctgctggcac

SEQ ID NO: 1686 - DNA, 36 bp, synthetic construct
  source 1..36: mol_type = other DNA
atctacaacagtagaaatcttatagacgtattagac

SEQ ID NO: 1687 - DNA, 36 bp, synthetic construct
  source 1..36: mol_type = other DNA
gccgcatcggccgacgcggctatgatcgatggacac

SEQ ID NO: 1688 - DNA, 36 bp, synthetic construct
  source 1..36: mol_type = other DNA
gtctataggacttggataatttctactattgtagat

SEQ ID NO: 1689 - DNA, 36 bp, synthetic construct
  source 1..36: mol_type = other DNA
atctacaacagtagaaattatataggtcttatagac

SEQ ID NO: 1690 - DNA, 37 bp, synthetic construct
  source 1..37: mol_type = other DNA
agtctaatacgtctataagatttctactgttgtagat

SEQ ID NO: 1691 - DNA, 36 bp, synthetic construct
  source 1..36: mol_type = other DNA
gtctaaaggctttggcaaatttctactgttgtagat

SEQ ID NO: 1692 - DNA, 36 bp, synthetic construct
  source 1..36: mol_type = other DNA
ccgcctcacgattcttggattcgcgccgactgaagc

SEQ ID NO: 1693 - DNA, 36 bp, synthetic construct
  source 1..36: mol_type = other DNA
atctacaacagtagaaatttatttcagctattaaac

SEQ ID NO: 1694 - DNA, 36 bp, synthetic construct; identical to SEQ ID NO: 1618
  source 1..36: mol_type = other DNA

SEQ ID NO: 1695 - DNA, 36 bp, synthetic construct
  source 1..36: mol_type = other DNA
gtctaatactgatataagatttctacttttgtagat

SEQ ID NO: 1696 - DNA, 35 bp, synthetic construct
  source 1..35: mol_type = other DNA
tttaaagaccttagataatttctactattgtagat

SEQ ID NO: 1697 - DNA, 36 bp, synthetic construct
  source 1..36: mol_type = other DNA
atctacaatagtagaaattattagagcctactagcc

SEQ ID NO: 1698 - DNA, 36 bp, synthetic construct
  source 1..36: mol_type = other DNA
atctacaatagtagaaattcaattggctgtgtagcc

SEQ ID NO: 1699 - DNA, 36 bp, synthetic construct
  source 1..36: mol_type = other DNA
atctacaaaagtagaaatgtgctatctgtatttgag

SEQ ID NO: 1700 - DNA, 36 bp, synthetic construct
  source 1..36: mol_type = other DNA
gttgagtaacacaagaaaatttctgcttttgcagat

SEQ ID NO: 1701 - DNA, 36 bp, synthetic construct
  source 1..36: mol_type = other DNA
ctctacaagagtagagatttaattcaacttatagac

SEQ ID NO: 1702 - DNA, 36 bp, synthetic construct
  source 1..36: mol_type = other DNA
gtctataaggacttgataatttctactatcgtagat

SEQ ID NO: 1703 - DNA, 36 bp, synthetic construct
  source 1..36: mol_type = other DNA
gtctataaggactagataatttctactatcgtagat

SEQ ID NO: 1704 - DNA, 36 bp, synthetic construct
  source 1..36: mol_type = other DNA
gtctaaatgactttattaatttctactattgtagat

SEQ ID NO: 1705 - DNA, 36 bp, synthetic construct
  source 1..36: mol_type = other DNA
atctacaacagtagaaatttaaatgttttgcttgac

SEQ ID NO: 1706 - DNA, 36 bp, synthetic construct
  source 1..36: mol_type = other DNA
atctacaatagtagaaattataaaggcttttacacc

SEQ ID NO: 1707 - DNA, 36 bp, synthetic construct
  source 1..36: mol_type = other DNA
gcttcagtcggcgcgaattcaggaatcgtgaggcgg

SEQ ID NO: 1708 - DNA, 36 bp, synthetic construct
  source 1..36: mol_type = other DNA
ccgcctcacgattgccgcagtcgcggcgactgcggc

SEQ ID NO: 1709 - DNA, 36 bp, synthetic construct
  source 1..36: mol_type = other DNA
atctacaatagtagaaatttttaaagtcgtttagac

SEQ ID NO: 1710 - DNA, 36 bp, synthetic construct
  source 1..36: mol_type = other DNA
gtctgaaagactaatataatttctactattgtagat

SEQ ID NO: 1711 - DNA, 36 bp, synthetic construct
  source 1..36: mol_type = other DNA
gtgtccatcacttctattggttccaactcctgcgac

SEQ ID NO: 1712 - DNA, 36 bp, synthetic construct
  source 1..36: mol_type = other DNA
atctacactagtagaaattctttaaggttattcaac

SEQ ID NO: 1713 - DNA, 35 bp, synthetic construct
  source 1..35: mol_type = other DNA
gttataaggaacaaataaatgcctgctgttgcagg

SEQ ID NO: 1714 - DNA, 36 bp, synthetic construct
  source 1..36: mol_type = other DNA
atctacagaagtagaaattcaagtctctgaattgag

SEQ ID NO: 1715 - DNA, 36 bp, synthetic construct
  source 1..36: mol_type = other DNA
gtgtccatcgatcatgaccgcgtcggccgacgcggc

SEQ ID NO: 1716 - DNA, 36 bp, synthetic construct
  source 1..36: mol_type = other DNA
gccgcgtcggccgacgcggtcatgatcgatggacac

SEQ ID NO: 1717 - DNA, 36 bp, synthetic construct
  source 1..36: mol_type = other DNA
ggctataagcccaacataatttctacttgtgtagat

SEQ ID NO: 1718 - DNA, 36 bp, synthetic construct
  source 1..36: mol_type = other DNA
atctacgatagtagaaattatcaagtccttatagac

SEQ ID NO: 1719 - DNA, 36 bp, synthetic construct
  source 1..36: mol_type = other DNA
gcctgcatcagcaggcatttattgcttccttataac

SEQ ID NO: 1720 - DNA, 36 bp, synthetic construct
  source 1..36: mol_type = other DNA
atctacaatagtagaaattcatttgatctattagac

SEQ ID NO: 1721 - DNA, 36 bp, synthetic construct
  source 1..36: mol_type = other DNA
atctacaacagtagaaattaaaatgccttttcagac

SEQ ID NO: 1722 - DNA, 36 bp, synthetic construct; identical to SEQ ID NO: 1654
  source 1..36: mol_type = other DNA

SEQ ID NO: 1723 - DNA, 36 bp, synthetic construct
  source 1..36: mol_type = other DNA
atctacaacagtagaaattagaagggattattagtc

SEQ ID NO: 1724 - DNA, 36 bp, synthetic construct
  source 1..36: mol_type = other DNA
gtcgcaggagttggaaccaatagaagtgatggacac

SEQ ID NO: 1725 - DNA, 36 bp, synthetic construct
  source 1..36: mol_type = other DNA
gtttaaaatcaccataaaatttctacttttgtagat

SEQ ID NO: 1726 - DNA, 36 bp, synthetic construct
  source 1..36: mol_type = other DNA
gcggccctgacagatgcgaagctgatcgacggacac

SEQ ID NO: 1727 - DNA, 36 bp, synthetic construct; identical to SEQ ID NO: 1723
  source 1..36: mol_type = other DNA

SEQ ID NO: 1728 - DNA, 36 bp, synthetic construct
  source 1..36: mol_type = other DNA
atctacaaaagtagaaattgaatggtggtattaaac

SEQ ID NO: 1729 - DNA, 36 bp, synthetic construct
  source 1..36: mol_type = other DNA
atctacaacagtagaaatttaattgggtattaaaac

SEQ ID NO: 1730 - DNA, 36 bp, synthetic construct
  source 1..36: mol_type = other DNA
gttgcggtgatcgaaagatgctgtgatcgttggcac

SEQ ID NO: 1731 - DNA, 38 bp, synthetic construct
  source 1..38: mol_type = other DNA
aagtgtcagtcgatcattggcgcgctgggctgcgcgcc

SEQ ID NO: 1732 - DNA, 36 bp, synthetic construct
  source 1..36: mol_type = other DNA
gtcgactcaagagccgactggctgatctgctgacac

SEQ ID NO: 1733 - DNA, 36 bp, synthetic construct
  source 1..36: mol_type = other DNA
attgttgtaatataagaaaatacctgtgtttacagg

SEQ ID NO: 1734 - DNA, 36 bp, synthetic construct
  source 1..36: mol_type = other DNA
gccgcagtcgccgcgattccggggggcgtgaggcgg

SEQ ID NO: 1735 - DNA, 36 bp, synthetic construct
  source 1..36: mol_type = other DNA
gactaataatcccttctaatttctactgttgtagat

SEQ ID NO: 1736 - DNA, 38 bp, synthetic construct
  source 1..38: mol_type = other DNA
gtccgaatacttacttgaataaagatctgttggcactt

SEQ ID NO: 1737 - DNA, 36 bp, synthetic construct
  source 1..36: mol_type = other DNA
gttttgaagtgttaaataatatctactattgtagat

SEQ ID NO: 1738 - DNA, 36 bp, synthetic construct
  source 1..36: mol_type = other DNA
atctgcaaaagcagaaattttcttgtgttactcaac

SEQ ID NO: 1739 - DNA, 36 bp, synthetic construct
  source 1..36: mol_type = other DNA
atctaccctagtagacatttcgcttacagtttcaac

SEQ ID NO: 1740 - DNA, 36 bp, synthetic construct
  source 1..36: mol_type = other DNA
gttgaaactgtaagcgaaatgtctactaaggtagat

SEQ ID NO: 1741 - DNA, 35 bp, synthetic construct
  source 1..35: mol_type = other DNA
atctacaacagtagaaatttatatcagctattaag

SEQ ID NO: 1742 - DNA, 27 bp, synthetic construct
  source 1..27: mol_type = other DNA
ccttgtaaattcgtaaggttcaaaacc

SEQ ID NO: 1743 - DNA, 36 bp, synthetic construct
  source 1..36: mol_type = other DNA
atctacagaagtagaaattactatctaatgatagag

SEQ ID NO: 1744 - DNA, 36 bp, synthetic construct; identical to SEQ ID NO: 1710
  source 1..36: mol_type = other DNA

SEQ ID NO: 1745 - DNA, 36 bp, synthetic construct
  source 1..36: mol_type = other DNA
atctacaatagtagaaattatattagtctttcagac

SEQ ID NO: 1746 - DNA, 36 bp, synthetic construct
  source 1..36: mol_type = other DNA
gttgtggtttggtaaaatcattagatacacaacaag

SEQ ID NO: 1747 - DNA, 36 bp, synthetic construct
  source 1..36: mol_type = other DNA
gcttaagacttagaaataatttctactattgtagat

SEQ ID NO: 1748 - DNA, 37 bp, synthetic construct
  source 1..37: mol_type = other DNA
ggtgtcggcagatcagtttgtcggcggatgagccgac

SEQ ID NO: 1749 - DNA, 36 bp, synthetic construct; identical to SEQ ID NO: 1747
  source 1..36: mol_type = other DNA

SEQ ID NO: 1750 - DNA, 38 bp, synthetic construct
  source 1..38: mol_type = other DNA
atatctacaatagtagaaattatatagggttattaaac

SEQ ID NO: 1751 - DNA, 35 bp, synthetic construct
  source 1..35: mol_type = other DNA
atctacaatagtagaaattattgaagcatactagc

SEQ ID NO: 1752 - DNA, 36 bp, synthetic construct
  source 1..36: mol_type = other DNA
gtgtccatcgatcaaggccgcgtcggttgacgcggc

SEQ ID NO: 1753 - DNA, 38 bp, synthetic construct
  source 1..38: mol_type = other DNA
ccgcctcaggctctttgaaacagcggcgactgcagctc

SEQ ID NO: 1754 - DNA, 36 bp, synthetic construct
  source 1..36: mol_type = other DNA
ctctaatacatatattcaatttctacttttgtagat

SEQ ID NO: 1755 - DNA, 36 bp, synthetic construct
  source 1..36: mol_type = other DNA
gtcaatacgactaaaaaaatttctactattgtagat

SEQ ID NO: 1756 - DNA, 36 bp, synthetic construct
  source 1..36: mol_type = other DNA
ggtgtaaaccatagtaaaatttctgctatcgcagat

SEQ ID NO: 1757 - DNA, 36 bp, synthetic construct; identical to SEQ ID NO: 1621
  source 1..36: mol_type = other DNA

SEQ ID NO: 1758 - DNA, 37 bp, synthetic construct
  source 1..37: mol_type = other DNA
aatctacaagagtagaaatttactttggtctttagcc

SEQ ID NO: 1759 - DNA, 36 bp, synthetic construct
  source 1..36: mol_type = other DNA
gtctatatggcctgattaatttctactattgtagat

SEQ ID NO: 1760 - DNA, 36 bp, synthetic construct
  source 1..36: mol_type = other DNA
gtctagcagacaataataatttctactattgtagat

SEQ ID NO: 1761 - DNA, 36 bp, synthetic construct
  source 1..36: mol_type = other DNA
gtttaacgcctataagaaatttctacttttgtagat

SEQ ID NO: 1762 - DNA, 36 bp, synthetic construct
  source 1..36: mol_type = other DNA
ggctagtatgcttcaataatttctactattgtagat

SEQ ID NO: 1763 - DNA, 36 bp, synthetic construct
  source 1..36: mol_type = other DNA
ccgcctcacgattcctgaagtcgcggtgactgcggt

SEQ ID NO: 1764 - DNA, 36 bp, synthetic construct
  source 1..36: mol_type = other DNA
atctacaacagtagaaattctttaggttcttgaatc

SEQ ID NO: 1765 - DNA, 36 bp, synthetic construct
  source 1..36: mol_type = other DNA
ggtgtaagaccatataaaatttctactattgtagat

SEQ ID NO: 1766 - DNA, 36 bp, synthetic construct
  source 1..36: mol_type = other DNA
gtctaaaggactcaaataatttctactattgtagat

SEQ ID NO: 1767 - DNA, 36 bp, synthetic construct
  source 1..36: mol_type = other DNA
gtcaaaactcattactaatttctactgtgtgtagat

SEQ ID NO: 1768 - DNA, 35 bp, synthetic construct
  source 1..35: mol_type = other DNA
gtgctatgcctatcgagaataatcaataggctgca

SEQ ID NO: 1769 - DNA, 36 bp, synthetic construct
  source 1..36: mol_type = other DNA
atctacaatagtagaaattaaaaaagccttttaaac

SEQ ID NO: 1770 - DNA, 36 bp, synthetic construct
  source 1..36: mol_type = other DNA
gtctaacgttaatagtagatttctacttttgtagat

SEQ ID NO: 1771 - DNA, 36 bp, synthetic construct
  source 1..36: mol_type = other DNA
gtttaaaaggcttttttaatttctactattgtagat

SEQ ID NO: 1772 - DNA, 36 bp, synthetic construct
  source 1..36: mol_type = other DNA
gcgtcagccgatcccggccctctgacccgctgcgac

SEQ ID NO: 1773 - DNA, 36 bp, synthetic construct
  source 1..36: mol_type = other DNA
gtgtccgtcgatcaggttggtgccgacgtcggcacc

SEQ ID NO: 1774 - DNA, 36 bp, synthetic construct
  source 1..36: mol_type = other DNA
gtctaaacgttatatttaatttctactattgtagat

SEQ ID NO: 1775 - DNA, 36 bp, synthetic construct; identical to SEQ ID NO: 1734
  source 1..36: mol_type = other DNA

SEQ ID NO: 1776 - DNA, 36 bp, synthetic construct
  source 1..36: mol_type = other DNA
gtctaaagagactataaaatttctactattgtagat

SEQ ID NO: 1777 - DNA, 36 bp, synthetic construct
  source 1..36: mol_type = other DNA
gcctgcaacagcaggcatttatttgttccttataac

SEQ ID NO: 1778 - DNA, 36 bp, synthetic construct
  source 1..36: mol_type = other DNA
gtgtcagttgattagcttcacgccggcttgtgctac

SEQ ID NO: 1779 - DNA, 36 bp, synthetic construct
  source 1..36: mol_type = other DNA
gccgcagtcgccgcgatttcaggaagcatgaggcgg

SEQ ID NO: 1780 - DNA, 36 bp, synthetic construct
  source 1..36: mol_type = other DNA
gtgtccatcgatcaaggccgcgtcggccggtgcggc

SEQ ID NO: 1781 - DNA, 36 bp, synthetic construct
  source 1..36: mol_type = other DNA
ggctataaggccatttgaatttctactattgtagat

SEQ ID NO: 1782 - DNA, 36 bp, synthetic construct
  source 1..36: mol_type = other DNA
atctacaatagtagaaatttaatatcgagtttaaac

SEQ ID NO: 1783 - DNA, 39 bp, synthetic construct
  source 1..39: mol_type = other DNA
caccgcctcaaggttatctgctctgcatggtgtgcactc

SEQ ID NO: 1784 - DNA, 32 bp, synthetic construct
  source 1..32: mol_type = other DNA
gccgcagcgccactcgacacatcgcgcagcgg

SEQ ID NO: 1785 - DNA, 36 bp, synthetic construct
  source 1..36: mol_type = other DNA
gttcctcttaatccttggaagaaaatctgtaagcac

SEQ ID NO: 1786 - DNA, 36 bp, synthetic construct
  source 1..36: mol_type = other DNA
atctacaatagtagaaattattagagcttactagcc

SEQ ID NO: 1787 - DNA, 36 bp, synthetic construct
  source 1..36: mol_type = other DNA
gttgaataaccttaaagaatttctactagtgtagat

SEQ ID NO: 1788 - DNA, 37 bp, synthetic construct
  source 1..37: mol_type = other DNA
aatctacaaaagtagaaatttgatatagggattagac

SEQ ID NO: 1789 - DNA, 36 bp, synthetic construct
  source 1..36: mol_type = other DNA
atctacaatagtagaaattttgaatttgggttagac

SEQ ID NO: 1790 - DNA, 43 bp, synthetic construct
  source 1..43: mol_type = other DNA
aaaaggctatgagtagcgcaaaatttctactattgtagattga

SEQ ID NO: 1791 - DNA, 36 bp, synthetic construct
  source 1..36: mol_type = other DNA
atctacaatagtagaaattaatatgagtctttagac

SEQ ID NO: 1792 - DNA, 36 bp, synthetic construct; identical to SEQ ID NO: 1630
  source 1..36: mol_type = other DNA

SEQ ID NO: 1793 - DNA, 36 bp, synthetic construct
  source 1..36: mol_type = other DNA
atctacaacagtagaaattttatttcttctttaaac

SEQ ID NO: 1794 - DNA, 36 bp, synthetic construct
  source 1..36: mol_type = other DNA
gtctagacgattgtaagaatttctactattgtagat

SEQ ID NO: 1795 - DNA, 38 bp, synthetic construct
  source 1..38: mol_type = other DNA
ccccttccgttaccgtgattccaagaaccttgaggcgg

SEQ ID NO: 1796 - DNA, 36 bp, synthetic construct
  source 1..36: mol_type = other DNA
gccgcagtcgccgcgactgcggcaatcgtgaggcgg

SEQ ID NO: 1797 - DNA, 36 bp, synthetic construct
  source 1..36: mol_type = other DNA
atctacgaaagtagaaatctactatatggaatagac

SEQ ID NO: 1798 - DNA, 36 bp, synthetic construct
  source 1..36: mol_type = other DNA
gtttaataaacccttataatttctactgttgtagat

SEQ ID NO: 1799 - DNA, 32 bp, synthetic construct
  source 1..32: mol_type = other DNA
ctctaagaggtatataaaatttctactattgt

SEQ ID NO: 1800 - DNA, 37 bp, synthetic construct
  source 1..37: mol_type = other DNA
agtgtccgtcgatcaggttggtgccgacgtcggcacc

SEQ ID NO: 1801 - DNA, 36 bp, synthetic construct
  source 1..36: mol_type = other DNA
gtctatacggacttgataatttctactatcgtagat

SEQ ID NO: 1802 - DNA, 38 bp, synthetic construct
  source 1..38: mol_type = other DNA
atctacaaaagtagaaatcttatattggtattagacga

SEQ ID NO: 1803 - DNA, 36 bp, synthetic construct; identical to SEQ ID NO: 1668
  source 1..36: mol_type = other DNA

SEQ ID NO: 1804 - DNA, 36 bp, synthetic construct
  source 1..36: mol_type = other DNA
gtagaaatagtgatttgggaaaatgagtagagagac

SEQ ID NO: 1805 - DNA, 36 bp, synthetic construct
  source 1..36: mol_type = other DNA
atctacaaaagtagaaatttgatatagggattagac

SEQ ID NO: 1806 - DNA, 36 bp, synthetic construct
  source 1..36: mol_type = other DNA
gcctaagagcataatgaaatttctactgttgtagat

SEQ ID NO: 1807 - DNA, 36 bp, synthetic construct
  source 1..36: mol_type = other DNA
ggtgtaaggccattgaaaatttctacttgtgtagat

SEQ ID NO: 1808 - DNA, 36 bp, synthetic construct
  source 1..36: mol_type = other DNA
gttcgacatccctattggatttctacttttgtagat

SEQ ID NO: 1809 - DNA, 36 bp, synthetic construct
  source 1..36: mol_type = other DNA
gttctgcatccatattggatttctacttttgtagat

SEQ ID NO: 1810 - DNA, 36 bp, synthetic construct; identical to SEQ ID NO: 1796
  source 1..36: mol_type = other DNA

SEQ ID NO: 1811 - DNA, 36 bp, synthetic construct
  source 1..36: mol_type = other DNA
atctacaatagtagaaatttatataaggtattaaac

SEQ ID NO: 1812 - DNA, 36 bp, synthetic construct
  source 1..36: mol_type = other DNA
ccgccttcagctcgttgaggccgcaggggctgtcgg

SEQ ID NO: 1813 - DNA, 36 bp, synthetic construct
  source 1..36: mol_type = other DNA
ctttatagggtaatcagaatttctactgttgtagat

SEQ ID NO: 1814 - DNA, 36 bp, synthetic construct
  source 1..36: mol_type = other DNA
ggtgtaaaagcatacaaaatttctactattgtagat

SEQ ID NO: 1815 - DNA, 36 bp, synthetic construct
  source 1..36: mol_type = other DNA
atctacgaaagtagaaattctaatggctttatagcc

SEQ ID NO: 1816 - DNA, 36 bp, synthetic construct; identical to SEQ ID NO: 1719
  source 1..36: mol_type = other DNA

SEQ ID NO: 1817 - DNA, 36 bp, synthetic construct
  source 1..36: mol_type = other DNA
ctcaaatagacctattaaatttctacttttgtagat

SEQ ID NO: 1818 - DNA, 36 bp, synthetic construct
  source 1..36: mol_type = other DNA
ggctataaagccattttaatttctactattgtagat

SEQ ID NO: 1819 - DNA, 38 bp, synthetic construct
  source 1..38: mol_type = other DNA
gtttaatacagatattcaatttctacttttgtagatat

SEQ ID NO: 1820 - DNA, 35 bp, synthetic construct
  source 1..35: mol_type = other DNA
atctacacgaagtagagattcgaatgagttttgac

SEQ ID NO: 1821 - DNA, 36 bp, synthetic construct
  source 1..36: mol_type = other DNA
gtccttcaacagttccgaagagaggtctgcgggcac

SEQ ID NO: 1822 - DNA, 37 bp, synthetic construct
  source 1..37: mol_type = other DNA
gccgcagtcgccgcgactgcggcaatcgtgaggcggg

SEQ ID NO: 1823 - DNA, 36 bp, synthetic construct
  source 1..36: mol_type = other DNA
gccgacgaattcgccggcatctcgatcgactgacac

SEQ ID NO: 1824 - DNA, 36 bp, synthetic construct
  source 1..36: mol_type = other DNA
gtctaaaagaccatatgaatttctactttcgtagat

SEQ ID NO: 1825 - DNA, 35 bp, synthetic construct
  source 1..35: mol_type = other DNA
gtgtccgtcgatcaggttggtgccgacgtcggcac

SEQ ID NO: 1826 - DNA, 22 bp, synthetic construct
  source 1..22: mol_type = other DNA
tacaatctctactcatgtagat

SEQ ID NO: 1827 - DNA, 36 bp, synthetic construct
  source 1..36: mol_type = other DNA
ggtgtaagaccacagaaaatttctacttgtgtagat

SEQ ID NO: 1828 - DNA, 33 bp, synthetic construct
  source 1..33: mol_type = other DNA
tacaatagtagaaattcatttggcttattagtc

SEQ ID NO: 1829 - DNA, 36 bp, synthetic construct
  source 1..36: mol_type = other DNA
gtgtccgtcgatcaggttgttgccaacttcggcacc

SEQ ID NO: 1830 - DNA, 37 bp, synthetic construct
  source 1..37: mol_type = other DNA
gtcccaatagtttttagtatcaaaaggcttataagac

SEQ ID NO: 1831 - DNA, 37 bp, synthetic construct
  source 1..37: mol_type = other DNA
cccgcagctaggccggaagaagaggattcgctggcac

SEQ ID NO: 1832 - DNA, 36 bp, synthetic construct; identical to SEQ ID NO: 1678
  source 1..36: mol_type = other DNA

SEQ ID NO: 1833 - DNA, 36 bp, synthetic construct
  source 1..36: mol_type = other DNA
atctacaatagtagaaatttaactggttcatacacc

SEQ ID NO: 1834 - DNA, 36 bp, synthetic construct
  source 1..36: mol_type = other DNA
gtccgatcagccgacagagattccgattgctgggac

SEQ ID NO: 1835 - DNA, 36 bp, synthetic construct; identical to SEQ ID NO: 1649
  source 1..36: mol_type = other DNA

SEQ ID NO: 1836 - DNA, 37 bp, synthetic construct
  source 1..37: mol_type = other DNA
tatctacgatagtagaaattattattgccttataggc

SEQ ID NO: 1837 - DNA, 36 bp, synthetic construct
  source 1..36: mol_type = other DNA
gtgccacttacaccacgaaacggatgtaccctcagc

SEQ ID NO: 1838 - DNA, 37 bp, synthetic construct
  source 1..37: mol_type = other DNA
gtgcatacacttataattacaagatatctgttctgac

SEQ ID NO: 1839 - DNA, 36 bp, synthetic construct
  source 1..36: mol_type = other DNA
atctacaaaagtagaaatttaatataggtattagac

SEQ ID NO: 1840 - DNA, 36 bp, synthetic construct
  source 1..36: mol_type = other DNA
gtgtcagtcaattaactcaatttcaagcggtgcgat

SEQ ID NO: 1841 - DNA, 34 bp, synthetic construct
  source 1..34: mol_type = other DNA
ttaaataataatttaaaatgtctacttgttagat

SEQ ID NO: 1842 - DNA, 36 bp, synthetic construct
  source 1..36: mol_type = other DNA
gttgaacgcctcgcgtttccgaagagcttcaggcgg

SEQ ID NO: 1843 - DNA, 36 bp, synthetic construct
  source 1..36: mol_type = other DNA
ctctattaccaataagaaatttctacttttgtagat

SEQ ID NO: 1844 - DNA, 36 bp, synthetic construct
  source 1..36: mol_type = other DNA
gtttagaaagtctaaaaaatttctactattgtagat

SEQ ID NO: 1845 - DNA, 36 bp, synthetic construct
  source 1..36: mol_type = other DNA
ggctataatgcctaagtaatttctactattgtagat

SEQ ID NO: 1846 - DNA, 36 bp, synthetic construct
  source 1..36: mol_type = other DNA
ccgcctcacgccccccggaatcgcggcgactgcggc

SEQ ID NO: 1847 - DNA, 29 bp, synthetic construct
  source 1..29: mol_type = other DNA
tcctgcttgatctacatttagtagagatt

SEQ ID NO: 1848 - DNA, 36 bp, synthetic construct
  source 1..36: mol_type = other DNA
atctacaatagtagaaattattataagttactcaac

SEQ ID NO: 1849 - DNA, 36 bp, synthetic construct; identical to SEQ ID NO: 1636
  source 1..36: mol_type = other DNA

SEQ ID NO: 1850 - DNA, 36 bp, synthetic construct
  source 1..36: mol_type = other DNA
gtctaatccctatatcaaatttctacttttgtagat

SEQ ID NO: 1851 - DNA, 34 bp, synthetic construct
  source 1..34: mol_type = other DNA
gtcccacctgacgaggaaatctcaaagcgttggc

SEQ ID NO: 1852 - DNA, 36 bp, synthetic construct; identical to SEQ ID NO: 1655
  source 1..36: mol_type = other DNA

SEQ ID NO: 1853 - DNA, 36 bp, synthetic construct
  source 1..36: mol_type = other DNA
gccgcagtcgccgtgattccggggggcgtgaggcgg

SEQ ID NO: 1854 - DNA, 36 bp, synthetic construct
  source 1..36: mol_type = other DNA
gagcgcccccccggttcgattctgatcggctgacac

SEQ ID NO: 1855 - DNA, 36 bp, synthetic construct; identical to SEQ ID NO: 1805
  source 1..36: mol_type = other DNA

SEQ ID NO: 1856 - DNA, 36 bp, synthetic construct; identical to SEQ ID NO: 1850
  source 1..36: mol_type = other DNA

SEQ ID NO: 1857 - DNA, 36 bp, synthetic construct
  source 1..36: mol_type = other DNA
atctacaatagtagaaatttacattgagtcctaaac

SEQ ID NO: 1858 - DNA, 36 bp, synthetic construct
  source 1..36: mol_type = other DNA
gtctaagggccttaataaatttctactatcgtagat

SEQ ID NO: 1859 - DNA, 36 bp, synthetic construct
  source 1..36: mol_type = other DNA
atctacaatagtagaaattatctgaagcttctagac

SEQ ID NO: 1860 - DNA, 36 bp, synthetic construct
  source 1..36: mol_type = other DNA
gtcaaaaccggataaaaaatttctactgttgtagat

SEQ ID NO: 1861 - DNA, 36 bp, synthetic construct
  source 1..36: mol_type = other DNA
gtctcgcccgacgacagctttttgatccggtgcgcc

SEQ ID NO: 1862 - DNA, 36 bp, synthetic construct
  source 1..36: mol_type = other DNA
atctacaatagtagaaattgattgattagtctagac

SEQ ID NO: 1863 - DNA, 36 bp, synthetic construct
  source 1..36: mol_type = other DNA
gtccaaaggacggattaaatttctactattgtagat

SEQ ID NO: 1864 - DNA, 37 bp, synthetic construct
  source 1..37: mol_type = other DNA
gtgccaacaacgttgccttctaggacttcgttgcgcc

SEQ ID NO: 1865 - DNA, 36 bp, synthetic construct
  source 1..36: mol_type = other DNA
atctacaacagtagaaatttggtggtacctttagac

SEQ ID NO: 1866 - DNA, 37 bp, synthetic construct
  source 1..37: mol_type = other DNA
ggtgctgcgtgcctacatttgaggggtctctggcact

SEQ ID NO: 1867 - DNA, 36 bp, synthetic construct
  source 1..36: mol_type = other DNA
ctctaagaggtatataaaatttctactattgtagat

SEQ ID NO: 1868 - DNA, 36 bp, synthetic construct
  source 1..36: mol_type = other DNA
gacgcagtcgccgctgtttcaaagagattgaggcgg

SEQ ID NO: 1869 - DNA, 36 bp, synthetic construct
  source 1..36: mol_type = other DNA
gtccgagtaaatagtgaaaagctacggagttagcac

SEQ ID NO: 1870 - DNA, 38 bp, synthetic construct
  source 1..38: mol_type = other DNA
gtgccaacagcagtctctcatcaggcaccgctgcaccg

SEQ ID NO: 1871 - DNA, 36 bp, synthetic construct
  source 1..36: mol_type = other DNA
gtgtcggcaggtcagttcgtcggctcgtgagccgac

SEQ ID NO: 1872 - DNA, 36 bp, synthetic construct; identical to SEQ ID NO: 1763
  source 1..36: mol_type = other DNA

SEQ ID NO: 1873 - DNA, 36 bp, synthetic construct
  source 1..36: mol_type = other DNA
accgcagtcaccgcgacttcaggaatcgtgaggcgg

SEQ ID NO: 1874 - DNA, 37 bp, synthetic construct
  source 1..37: mol_type = other DNA
ggcgcaacgaagtcctagaaggcaacgttgttggcac

SEQ ID NO: 1875 - DNA, 38 bp, synthetic construct
  source 1..38: mol_type = other DNA
ccgcctcacgccccccggaatcgcgccgactgcggctt

SEQ ID NO: 1876 - DNA, 36 bp, synthetic construct
  source 1..36: mol_type = other DNA
gtgctaacctcgaagctttccactaagctttcgaac

SEQ ID NO: 1877 - DNA, 36 bp, synthetic construct
  source 1..36: mol_type = other DNA
gtctaagagacattttaaatttctactattgtagat

SEQ ID NO: 1878 - DNA, 36 bp, synthetic construct
  source 1..36: mol_type = other DNA
gtgtccggtgcgatcaggttttcttcggtttgctcc

SEQ ID NO: 1879 - DNA, 37 bp, synthetic construct
  source 1..37: mol_type = other DNA
gtgccaacgaaggtgcagtaccccatcgcgttgctgc

SEQ ID NO: 1880 - DNA, 36 bp, synthetic construct
  source 1..36: mol_type = other DNA
gtctaatccatatactcaatttctacttttgtagat

SEQ ID NO: 1881 - DNA, 37 bp, synthetic construct
  source 1..37: mol_type = other DNA
gcatcagccgagggtgagaagcggaggccgttggcac

SEQ ID NO: 1882 - DNA, 37 bp, synthetic construct
  source 1..37: mol_type = other DNA
gttttacattataaaaagaagataatcttattgcact

SEQ ID NO: 1883 - DNA, 36 bp, synthetic construct
  source 1..36: mol_type = other DNA
gtgccagttaccccacgaatttggggtaaccgcaac

SEQ ID NO: 1884 - DNA, 33 bp, synthetic construct
  source 1..33: mol_type = other DNA
caaccaggggacctgggcgatcctcgttggcac

SEQ ID NO: 1885 - DNA, 37 bp, synthetic construct
  source 1..37: mol_type = other DNA
gtgccaacgaggatcgcccaggtcccctggttgcggc

SEQ ID NO: 1886 - DNA, 24 bp, synthetic construct
  source 1..24: mol_type = other DNA
gtggcgctggcagtgacgccggat

SEQ ID NO: 1887 - DNA, 31 bp, synthetic construct
  source 1..31: mol_type = other DNA
gtccttcaacagttccgaagagaggtctgcg

SEQ ID NO: 1888 - DNA, 38 bp, synthetic construct; identical to SEQ ID NO: 1736
  source 1..38: mol_type = other DNA

SEQ ID NO: 1889 - DNA, 36 bp, synthetic construct
  source 1..36: mol_type = other DNA
ctctatcatcagatagtaatttctacttgtgtagat

SEQ ID NO: 1890 - DNA, 36 bp, synthetic construct; identical to SEQ ID NO: 1707
  source 1..36: mol_type = other DNA

SEQ ID NO: 1891 - DNA, 36 bp, synthetic construct
  source 1..36: mol_type = other DNA
atctacaatagtagaaattttatatgtattcacacc

SEQ ID NO: 1892 - DNA, 36 bp, synthetic construct
  source 1..36: mol_type = other DNA
gtgccattaccttacgcttctgcaaagcgttcatgc

SEQ ID NO: 1893 - DNA, 38 bp, synthetic construct
  source 1..38: mol_type = other DNA
atctacaatagtagaaattttgcatgctttcacacctt

SEQ ID NO: 1894 - DNA, 36 bp, synthetic construct
  source 1..36: mol_type = other DNA
gtctgaacactcaaaagaggaaaaggtaattggcac

SEQ ID NO: 1895 - DNA, 36 bp, synthetic construct
  source 1..36: mol_type = other DNA
gttcaaatgaagagaagaacataagaatataggcac

SEQ ID NO: 1896 - DNA, 20 bp, synthetic construct
  source 1..20: mol_type = other DNA
aaaatgcctacttgttagac

SEQ ID NO: 1897 - DNA, 35 bp, synthetic construct
  source 1..35: mol_type = other DNA
cttaatagctgatataaatttctactgttgtagat

SEQ ID NO: 1898 - DNA, 37 bp, synthetic construct
  source 1..37: mol_type = other DNA
tctctaagaggtatataaaatttctactattgtagat

SEQ ID NO: 1899 - DNA, 28 bp, synthetic construct
  source 1..28: mol_type = other DNA
tacagtagacatttattacttattaaac

SEQ ID NO: 1900 - DNA, 36 bp, synthetic construct; identical to SEQ ID NO: 1688
  source 1..36: mol_type = other DNA

SEQ ID NO: 1901 - DNA, 36 bp, synthetic construct
  source 1..36: mol_type = other DNA
ggctataaagctttttaaatttctactattgtagat

SEQ ID NO: 1902 - DNA, 36 bp, synthetic construct
  source 1..36: mol_type = other DNA
gaataataatccctattaatttctactgttgtagat

SEQ ID NO: 1903 - DNA, 34 bp, synthetic construct; identical to SEQ ID NO: 1841
  source 1..34: mol_type = other DNA

SEQ ID NO: 1904 - DNA, 36 bp, synthetic construct
  source 1..36: mol_type = other DNA
gtcccaccatctacagcttccggcagcgcttgcgac

SEQ ID NO: 1905 - DNA, 36 bp, synthetic construct
  source 1..36: mol_type = other DNA
atctacaatagtagaaattattgaagcatactagcc

SEQ ID NO: 1906 - DNA, 36 bp, synthetic construct
  source 1..36: mol_type = other DNA
ggctataccaagtcttgaatttctactgttgtagat

SEQ ID NO: 1907 - DNA, 34 bp, synthetic construct
  source 1..34: mol_type = other DNA
agtcccatcccctgcgcgtgcgcggagtgcgacg

SEQ ID NO: 1908 - DNA, 36 bp, synthetic construct
  source 1..36: mol_type = other DNA
gcctgaccgccccgatcaatggtggatagctggcac

SEQ ID NO: 1909 - DNA, 36 bp, synthetic construct
  source 1..36: mol_type = other DNA
gtctcactacacacacgatattctacctctttcaac

SEQ ID NO: 1910 - DNA, 36 bp, synthetic construct
  source 1..36: mol_type = other DNA
gtcctaataccccgattaatagtggatagctggcac

SEQ ID NO: 1911 - DNA, 36 bp, synthetic construct
  source 1..36: mol_type = other DNA
gtctaattgactcaattaatttctactattgtagat

SEQ ID NO: 1912 - DNA, 36 bp, synthetic construct
  source 1..36: mol_type = other DNA
gtctaataggcctatcaaatttctactattgtagat

SEQ ID NO: 1913 - DNA, 36 bp, synthetic construct; identical to SEQ ID NO: 1718
  source 1..36: mol_type = other DNA

SEQ ID NO: 1914 - DNA, 38 bp, synthetic construct
  source 1..38: mol_type = other DNA
ctgtctaatacagatattaaatttctacttttgtagat

SEQ ID NO: 1915 - DNA, 36 bp, synthetic construct
  source 1..36: mol_type = other DNA
gtctaacgacttcttttaatttctactattgtagat

SEQ ID NO: 1916 - DNA, 36 bp, synthetic construct
  source 1..36: mol_type = other DNA
atctacaaaagtagaaattgaatataggtattaaac

SEQ ID NO: 1917 - DNA, 36 bp, synthetic construct
  source 1..36: mol_type = other DNA
atctacaacagtagaaattatatgggtctgctagac

SEQ ID NO: 1918 - DNA, 36 bp, synthetic construct
  source 1..36: mol_type = other DNA
atctacaacagtagaaattcaagacttggtatagcc

SEQ ID NO: 1919 - DNA, 37 bp, synthetic construct
  source 1..37: mol_type = other DNA
gtgtccatctatcagaggcgcgtcggcctccggggcg

SEQ ID NO: 1920 - DNA, 36 bp, synthetic construct
  source 1..36: mol_type = other DNA
gtgcccgcagacctctcttcggaactgttgaaggac

SEQ ID NO: 1921 - DNA, 38 bp, synthetic construct
  source 1..38: mol_type = other DNA
gtcttagggcataaaggaaattgaatttgctggcacaa

SEQ ID NO: 1922 - DNA, 36 bp, synthetic construct
  source 1..36: mol_type = other DNA
gtgtccgtcgctcaccagagatgcggcctcggccgc

SEQ ID NO: 1923 - DNA, 36 bp, synthetic construct
  source 1..36: mol_type = other DNA
gtgccagctttcatccaatggccatgaaggaaggac

SEQ ID NO: 1924 - DNA, 36 bp, synthetic construct
  source 1..36: mol_type = other DNA
ctcaaatacaaatatcacatttctacttttgtagat

SEQ ID NO: 1925 - DNA, 36 bp, synthetic construct
  source 1..36: mol_type = other DNA
gttaaattaaatgtctactaaattcactatgtagat

SEQ ID NO: 1926 - DNA, 37 bp, synthetic construct
  source 1..37: mol_type = other DNA
gttaaattaaatgtctactaaattcactatgtagata

SEQ ID NO: 1927 - DNA, 35 bp, synthetic construct
  source 1..35: mol_type = other DNA
ctctacaacagtagagattttaatattttttcaag

SEQ ID NO: 1928 - DNA, 36 bp, synthetic construct
  source 1..36: mol_type = other DNA
gtcgactcatcagccaacaaactgatctgccgacac

SEQ ID NO: 1929 - DNA, 36 bp, synthetic construct
  source 1..36: mol_type = other DNA
gctgagaatatgaaaataatttctactgttgtagat

SEQ ID NO: 1930 - DNA, 36 bp, synthetic construct
  source 1..36: mol_type = other DNA
atctacaatagtagaaattacatttgacttatagcc

SEQ ID NO: 1931 - DNA, 36 bp, synthetic construct
  source 1..36: mol_type = other DNA
atctacgaatagtagaaattatattggcatatagcc

SEQ ID NO: 1932 - DNA, 32 bp, synthetic construct
  source 1..32: mol_type = other DNA
ggctaaaaggctttaaaaatttctactattgt

SEQ ID NO: 1933 - DNA, 36 bp, synthetic construct
  source 1..36: mol_type = other DNA
ccgcctcaagctcgctggaatcgcggcgactgcggc

SEQ ID NO: 1934 - DNA, 36 bp, synthetic construct
  source 1..36: mol_type = other DNA
ggctagtaatagcttgaaatttctactgttgtagat

SEQ ID NO: 1935 - DNA, 37 bp, synthetic construct
  source 1..37: mol_type = other DNA
atctacattacagtagaaattattattccttatagcc

SEQ ID NO: 1936 - DNA, 39 bp, synthetic construct
  source 1..39: mol_type = other DNA
atctacaagagtagaaattttatgaggcttttagcctct

SEQ ID NO: 1937 - DNA, 41 bp, synthetic construct
  source 1..41: mol_type = other DNA
ggtgcagttactggcgatttgtagggtaactggcacactca

SEQ ID NO: 1938 - DNA, 36 bp, synthetic construct
  source 1..36: mol_type = other DNA
ggtgtaaaccatagtaaaatttctgctattgcagat

SEQ ID NO: 1939 - DNA, 36 bp, synthetic construct
  source 1..36: mol_type = other DNA
atctacaatagtagaaattatgtatggttttacacc

SEQ ID NO: 1940 - DNA, 36 bp, synthetic construct; identical to SEQ ID NO: 1762
  source 1..36: mol_type = other DNA

SEQ ID NO: 1941 - DNA, 36 bp, synthetic construct
  source 1..36: mol_type = other DNA
atctacaatagtagaaattaaattggctttatagcc

SEQ ID NO: 1942 - DNA, 36 bp, synthetic construct
  source 1..36: mol_type = other DNA
gtttaaacatatatactaatttctaatttgttagat

SEQ ID NO: 1943 - DNA, 36 bp, synthetic construct; identical to SEQ ID NO: 1873
  source 1..36: mol_type = other DNA

SEQ ID NO: 1944 - DNA, 36 bp, synthetic construct
  source 1..36: mol_type = other DNA
gtttaataagaatatataatttctactatcgtagat

SEQ ID NO: 1945 - DNA, 36 bp, synthetic construct
  source 1..36: mol_type = other DNA
gtttaataataatatataatttctactatcgtagat

SEQ ID NO: 1946 - DNA, 36 bp, synthetic construct
  source 1..36: mol_type = other DNA
atctacaacagtagaaatttaatagttgtcttagac

SEQ ID NO: 1947 - DNA, 36 bp, synthetic construct
  source 1..36: mol_type = other DNA
gtcagacccctccgatcaatgatgaatagctggcac

SEQ ID NO: 1948 - DNA, 36 bp, synthetic construct
  source 1..36: mol_type = other DNA
gttaaatatcgatattagatttctactttcgtagat

SEQ ID NO: 1949 - DNA, 33 bp, synthetic construct
  source 1..33: mol_type = other DNA
ttaaaaaaaagttttaatatctacttgtgtaga

SEQ ID NO: 1950 - DNA, 26 bp, synthetic construct
  source 1..26: mol_type = other DNA
aagtagatattaaaacttttttttaa

SEQ ID NO: 1951 - DNA, 37 bp, synthetic construct
  source 1..37: mol_type = other DNA
ggctataagaaataatgatttctactggaatgtagat

SEQ ID NO: 1952 - DNA, 36 bp, synthetic construct
  source 1..36: mol_type = other DNA
ggctaaggccagccattaatttctactgttgtagat

SEQ ID NO: 1953 - DNA, 35 bp, synthetic construct
  source 1..35: mol_type = other DNA
ctgtaagggcatattaaatttctactattgtagat

SEQ ID NO: 1954 - DNA, 36 bp, synthetic construct
  source 1..36: mol_type = other DNA
atctacaagagtagaaatttacttcggtctttagcc

SEQ ID NO: 1955 - DNA, 36 bp, synthetic construct
  source 1..36: mol_type = other DNA
atctacaaaagtagaaatctaatagtgatattaaac

SEQ ID NO: 1956 - DNA, 36 bp, synthetic construct
  source 1..36: mol_type = other DNA
gatcttcctaatcgatcaattgtggatagctggcac

SEQ ID NO: 1957 - DNA, 36 bp, synthetic construct
  source 1..36: mol_type = other DNA
gtctaatacctatataaaatttctacttttgtagat

SEQ ID NO: 1958 - DNA, 36 bp, synthetic construct
  source 1..36: mol_type = other DNA
atctacaacagtagaaattctttaataatattaaat

SEQ ID NO: 1959 - DNA, 36 bp, synthetic construct; identical to SEQ ID NO: 1958
  source 1..36: mol_type = other DNA

SEQ ID NO: 1960 - DNA, 36 bp, synthetic construct
  source 1..36: mol_type = other DNA
gtttaataataatacataatttctactattgtagat

SEQ ID NO: 1961 - DNA, 36 bp, synthetic construct
  source 1..36: mol_type = other DNA
atttaatattattaaagaatttctactgttgtagat

SEQ ID NO: 1962 - DNA, 36 bp, synthetic construct; identical to SEQ ID NO: 1958
  source 1..36: mol_type = other DNA

SEQ ID NO: 1963 - DNA, 36 bp, synthetic construct; identical to SEQ ID NO: 1961
  source 1..36: mol_type = other DNA

SEQ ID NO: 1964 - DNA, 36 bp, synthetic construct; identical to SEQ ID NO: 1958
  source 1..36: mol_type = other DNA

SEQ ID NO: 1965 - DNA, 36 bp, synthetic construct; identical to SEQ ID NO: 1958
  source 1..36: mol_type = other DNA

SEQ ID NO: 1966 - DNA, 36 bp, synthetic construct; identical to SEQ ID NO: 1958
  source 1..36: mol_type = other DNA

SEQ ID NO: 1967 - DNA, 36 bp, synthetic construct; identical to SEQ ID NO: 1958
  source 1..36: mol_type = other DNA

SEQ ID NO: 1968 - DNA, 36 bp, synthetic construct; identical to SEQ ID NO: 1958
  source 1..36: mol_type = other DNA

SEQ ID NO: 1969 - DNA, 36 bp, synthetic construct
  source 1..36: mol_type = other DNA
atctacaacagtagaaattctttaataacattaaat

SEQ ID NO: 1970 - DNA, 36 bp, synthetic construct
  source 1..36: mol_type = other DNA
atttaattcctatagtagatttctactttcgtagat

SEQ ID NO: 1971 - DNA, 36 bp, synthetic construct; identical to SEQ ID NO: 1958
  source 1..36: mol_type = other DNA

SEQ ID NO: 1972 - DNA, 36 bp, synthetic construct; identical to SEQ ID NO: 1655
  source 1..36: mol_type = other DNA

SEQ ID NO: 1973 - DNA, 36 bp, synthetic construct
  source 1..36: mol_type = other DNA
gtttaataagaatacataatttctactatcgtagat

SEQ ID NO: 1974 - DNA, 36 bp, synthetic construct
  source 1..36: mol_type = other DNA
atttgcgttagagcaaaaattatatatgcgtacacc

SEQ ID NO: 1975 - DNA, 32 bp, synthetic construct
  source 1..32: mol_type = other DNA
gtcgttccccacgcgggaacgtggattgaaat

SEQ ID NO: 1976 - DNA, 34 bp, synthetic construct
  source 1..34: mol_type = other DNA
tgtacacatatataatttttactctaacgtaaat

SEQ ID NO: 1977 - DNA, 36 bp, synthetic construct; identical to SEQ ID NO: 1865
  source 1..36: mol_type = other DNA

SEQ ID NO: 1978 - DNA, 36 bp, synthetic construct; identical to SEQ ID NO: 1678
  source 1..36: mol_type = other DNA

SEQ ID NO: 1979 - DNA, 36 bp, synthetic construct
  source 1..36: mol_type = other DNA
atctacgaaagtagaaatctaatatcgatatttaac

SEQ ID NO: 1980 - DNA, 36 bp, synthetic construct; identical to SEQ ID NO: 1948
  source 1..36: mol_type = other DNA

SEQ ID NO: 1981 - DNA, 36 bp, synthetic construct
  source 1..36: mol_type = other DNA
gcttaagaataataaagaatttctactatcgtagat

SEQ ID NO: 1982 - DNA, 36 bp, synthetic construct; identical to SEQ ID NO: 1655
  source 1..36: mol_type = other DNA

SEQ ID NO: 1983 - DNA, 36 bp, synthetic construct
  source 1..36: mol_type = other DNA
gtctaggacctctaattaatttctacttatgtagat

SEQ ID NO: 1984 - DNA, 36 bp, synthetic construct; identical to SEQ ID NO: 1981
  source 1..36: mol_type = other DNA

SEQ ID NO: 1985 - DNA, 36 bp, synthetic construct
  source 1..36: mol_type = other DNA
atctaaaggtacctatcaatttctactattgtagat

SEQ ID NO: 1986 - DNA, 36 bp, synthetic construct; identical to SEQ ID NO: 1954
  source 1..36: mol_type = other DNA

SEQ ID NO: 1987 - DNA, 36 bp, synthetic construct
  source 1..36: mol_type = other DNA
atttaacaatcctttttaatttctactattgtagat

SEQ ID NO: 1988 - DNA, 36 bp, synthetic construct; identical to SEQ ID NO: 1987
  source 1..36: mol_type = other DNA

SEQ ID NO: 1989 - DNA, 36 bp, synthetic construct; identical to SEQ ID NO: 1948
  source 1..36: mol_type = other DNA

SEQ ID NO: 1990 - DNA, 36 bp, synthetic construct
  source 1..36: mol_type = other DNA
gtttaataattatttaaaatttctactattgtagat

SEQ ID NO: 1991 - DNA, 36 bp, synthetic construct
  source 1..36: mol_type = other DNA
gtctatcaaagataagaaatacctacttgtgtaggt

SEQ ID NO: 1992 - DNA, 35 bp, synthetic construct
  source 1..35: mol_type = other DNA
attgaaactcattcaaatttctactttcagtagat

SEQ ID NO: 1993 - DNA, 36 bp, synthetic construct
  source 1..36: mol_type = other DNA
gtcaaaactcattatcaaatttctacttgtgtagat

SEQ ID NO: 1994 - DNA, 36 bp, synthetic construct
  source 1..36: mol_type = other DNA
atctacacaagtagaaatttgataatgagttttgac

SEQ ID NO: 1995 - DNA, 36 bp, synthetic construct
  source 1..36: mol_type = other DNA
atctacacaggagtagaaattatacgtttttcagac

SEQ ID NO: 1996 - DNA, 36 bp, synthetic construct
  source 1..36: mol_type = other DNA
ctttaatatagatattcaatttctacttttgtagat

SEQ ID NO: 1997 - DNA, 19 bp, synthetic construct
  source 1..19: mol_type = other DNA
tttaacaagtaaacatttt

SEQ ID NO: 1998 - DNA, 37 bp, synthetic construct
  source 1..37: mol_type = other DNA
ggaataataacctcacataatttctactgttgtagat

SEQ ID NO: 1999 - DNA, 36 bp, synthetic construct
  source 1..36: mol_type = other DNA
atctacaatagtagaaattatgtattattattaaac

SEQ ID NO: 2000 - DNA, 36 bp, synthetic construct; identical to SEQ ID NO: 1999
  source 1..36: mol_type = other DNA

SEQ ID NO: 2001 - DNA, 36 bp, synthetic construct
  source 1..36: mol_type = other DNA
gtggcgctggcagtgacgccggatggctgttggcac

SEQ ID NO: 2002 - DNA, 37 bp, synthetic construct
  source 1..37: mol_type = other DNA
tagtgtacacatatataatttttgctctaaagcaaat

SEQ ID NO: 2003 - DNA, 36 bp, synthetic construct
  source 1..36: mol_type = other DNA
gtctaatcacctctaataatttctactgttgtagat

SEQ ID NO: 2004 - DNA, 37 bp, synthetic construct
  source 1..37: mol_type = other DNA
gtttaataaccctatataatttctactattgtagata

SEQ ID NO: 2005 - DNA, 38 bp, synthetic construct
  source 1..38: mol_type = other DNA
ctatctgcaatagcagaaattatactatggtttacacc

SEQ ID NO: 2006 - DNA, 26 bp, synthetic construct
  source 1..26: mol_type = other DNA
atattattaatttctacttttgtaga

SEQ ID NO: 2007 - DNA, 36 bp, synthetic construct
  source 1..36: mol_type = other DNA
ggtgtgaatacatataaaatttctactattgtagat

SEQ ID NO: 2008 - DNA, 36 bp, synthetic construct
  source 1..36: mol_type = other DNA
ggctacacagccaattgaatttctactattgtagat

SEQ ID NO: 2009 - DNA, 28 bp, synthetic construct
  source 1..28: mol_type = other DNA
gagacacccctactcgcgtagggaaaac

SEQ ID NO: 2010 - DNA, 36 bp, synthetic construct
  source 1..36: mol_type = other DNA
atctacaatagtagaaattttgggtaccttttagac

SEQ ID NO: 2011 - DNA, 36 bp, synthetic construct
  source 1..36: mol_type = other DNA
gtttaataaagcacctttatttctacttttgtagat

SEQ ID NO: 2012 - DNA, 31 bp, synthetic construct
  source 1..31: mol_type = other DNA
atctacacttagtagaaattaataaaggtac

SEQ ID NO: 2013 - DNA, 36 bp, synthetic construct
  source 1..36: mol_type = other DNA
atctacaatagtagaaatttaattaaggtattaaac

SEQ ID NO: 2014 - DNA, 36 bp, synthetic construct
  source 1..36: mol_type = other DNA
gaataattactccttataatttctactgttgtagat

SEQ ID NO: 2015 - DNA, 35 bp, synthetic construct; identical to SEQ ID NO: 1897
  source 1..35: mol_type = other DNA

SEQ ID NO: 2016 - DNA, 36 bp, synthetic construct; identical to SEQ ID NO: 1678
  source 1..36: mol_type = other DNA

SEQ ID NO: 2017 - DNA, 35 bp, synthetic construct; identical to SEQ ID NO: 1741
  source 1..35: mol_type = other DNA

SEQ ID NO: 2018 - DNA, 35 bp, synthetic construct; identical to SEQ ID NO: 1897
  source 1..35: mol_type = other DNA

SEQ ID NO: 2019 - DNA, 36 bp, synthetic construct
  source 1..36: mol_type = other DNA
gtttagaaaatataaataatttctacttatgtagag

SEQ ID NO: 2020 - DNA, 36 bp, synthetic construct; identical to SEQ ID NO: 1678
  source 1..36: mol_type = other DNA

SEQ ID NO: 2021 - DNA, 36 bp, synthetic construct
  source 1..36: mol_type = other DNA
atctacacttagtagaaattaataaaggtaccaaac

SEQ ID NO: 2022 - DNA, 36 bp, synthetic construct; identical to SEQ ID NO: 1618
  source 1..36: mol_type = other DNA

SEQ ID NO: 2023 - DNA, 36 bp, synthetic construct; identical to SEQ ID NO: 1762
  source 1..36: mol_type = other DNA

SEQ ID NO: 2024 - DNA, 36 bp, synthetic construct
  source 1..36: mol_type = other DNA
gtttaataccttatataaatttctactattgtagat

SEQ ID NO: 2025 - DNA, 36 bp, synthetic construct; identical to SEQ ID NO: 1649
  source 1..36: mol_type = other DNA

SEQ ID NO: 2026 - DNA, 36 bp, synthetic construct; identical to SEQ ID NO: 2024
  source 1..36: mol_type = other DNA

SEQ ID NO: 2027 - DNA, 36 bp, synthetic construct; identical to SEQ ID NO: 2024
  source 1..36: mol_type = other DNA

SEQ ID NO: 2028 - DNA, 36 bp, synthetic construct; identical to SEQ ID NO: 2024
  source 1..36: mol_type = other DNA

SEQ ID NO: 2029 - DNA, 36 bp, synthetic construct; identical to SEQ ID NO: 2024
  source 1..36: mol_type = other DNA

SEQ ID NO: 2030 - DNA, 29 bp, synthetic construct
  source 1..29: mol_type = other DNA
atagtagaaatttatataaggtattaaac

SEQ ID NO: 2031 - DNA, 36 bp, synthetic construct; identical to SEQ ID NO: 1811
  source 1..36: mol_type = other DNA

SEQ ID NO: 2032 - DNA, 36 bp, synthetic construct; identical to SEQ ID NO: 2024
  source 1..36: mol_type = other DNA

SEQ ID NO: 2033 - DNA, 36 bp, synthetic construct; identical to SEQ ID NO: 2024
  source 1..36: mol_type = other DNA

SEQ ID NO: 2034 - DNA, 36 bp, synthetic construct; identical to SEQ ID NO: 1811
  source 1..36: mol_type = other DNA

SEQ ID NO: 2035 - DNA, 36 bp, synthetic construct; identical to SEQ ID NO: 2024
  source 1..36: mol_type = other DNA

SEQ ID NO: 2036 - DNA, 36 bp, synthetic construct; identical to SEQ ID NO: 1811
  source 1..36: mol_type = other DNA

SEQ ID NO: 2037 - DNA, 36 bp, synthetic construct; identical to SEQ ID NO: 1811
  source 1..36: mol_type = other DNA

SEQ ID NO: 2038 - DNA, 36 bp, synthetic construct
  source 1..36: mol_type = other DNA
ggtttggaaccttgttaaaatgtctacttgttagac

SEQ ID NO: 2039 - DNA, 36 bp, synthetic construct; identical to SEQ ID NO: 1811
  source 1..36: mol_type = other DNA

SEQ ID NO: 2040 - DNA, 36 bp, synthetic construct; identical to SEQ ID NO: 1811
  source 1..36: mol_type = other DNA

SEQ ID NO: 2041 - DNA, 36 bp, synthetic construct; identical to SEQ ID NO: 1668
  source 1..36: mol_type = other DNA

SEQ ID NO: 2042 - DNA, 40 bp, synthetic construct
  source 1..40: mol_type = other DNA
ttcaatctacaaaagtagaaattcactataggtaataggc

SEQ ID NO: 2043 - DNA, 36 bp, synthetic construct; identical to SEQ ID NO: 1655
  source 1..36: mol_type = other DNA

SEQ ID NO: 2044 - DNA, 36 bp, synthetic construct; identical to SEQ ID NO: 1668
  source 1..36: mol_type = other DNA

SEQ ID NO: 2045 - DNA, 34 bp, synthetic construct
  source 1..34: mol_type = other DNA
ttaataatccctaataatttctactgttgtagat

SEQ ID NO: 2046 - DNA, 36 bp, synthetic construct; identical to SEQ ID NO: 1668
  source 1..36: mol_type = other DNA

SEQ ID NO: 2047 - DNA, 36 bp, synthetic construct; identical to SEQ ID NO: 1668
  source 1..36: mol_type = other DNA

SEQ ID NO: 2048 - DNA, 36 bp, synthetic construct; identical to SEQ ID NO: 1668
  source 1..36: mol_type = other DNA

SEQ ID NO: 2049 - DNA, 36 bp, synthetic construct; identical to SEQ ID NO: 1668
  source 1..36: mol_type = other DNA

SEQ ID NO: 2050 - DNA, 36 bp, synthetic construct; identical to SEQ ID NO: 1655
  source 1..36: mol_type = other DNA

SEQ ID NO: 2051 - DNA, 35 bp, synthetic construct
  source 1..35: mol_type = other DNA
attaataatccctaataatttctactgttgtagat

SEQ ID NO: 2052 - DNA, 36 bp, synthetic construct; identical to SEQ ID NO: 1655
  source 1..36: mol_type = other DNA

SEQ ID NO: 2053 - DNA, 36 bp, synthetic construct
  source 1..36: mol_type = other DNA
gtctaggcgctcaatgaaatttctactattgtagat

SEQ ID NO: 2054 - DNA, 36 bp, synthetic construct; identical to SEQ ID NO: 1668
  source 1..36: mol_type = other DNA

SEQ ID NO: 2055 - DNA, 36 bp, synthetic construct
  source 1..36: mol_type = other DNA
gattaataatcccttataatttctactgttgtagat

SEQ ID NO: 2056 - DNA, 36 bp, synthetic construct; identical to SEQ ID NO: 1668
  source 1..36: mol_type = other DNA

SEQ ID NO: 2057 - DNA, 36 bp, synthetic construct
  source 1..36: mol_type = other DNA
gtcttaaggcttaaaaggatttgaatttgctggcac

SEQ ID NO: 2058 - DNA, 31 bp, synthetic construct
  source 1..31: mol_type = other DNA
atctacaacagtagaaattattagggattat

SEQ ID NO: 2059 - DNA, 36 bp, synthetic construct; identical to SEQ ID NO: 1655
  source 1..36: mol_type = other DNA

SEQ ID NO: 2060 - DNA, 36 bp, synthetic construct
  source 1..36: mol_type = other DNA
gcctagaacccctttataatttctactattgtagat

SEQ ID NO: 2061 - DNA, 38 bp, synthetic construct
  source 1..38: mol_type = other DNA
gattaataatccctaataatttctactgttgtagattt

SEQ ID NO: 2062 - DNA, 36 bp, synthetic construct; identical to SEQ ID NO: 1655
  source 1..36: mol_type = other DNA

SEQ ID NO: 2063 - DNA, 36 bp, synthetic construct
  source 1..36: mol_type = other DNA
gtctaatttttacggtcaatttctactaatgtagat

SEQ ID NO: 2064 - DNA, 29 bp, synthetic construct
  source 1..29: mol_type = other DNA
atctacaacagtagaaattattagggatt

SEQ ID NO: 2065 - DNA, 36 bp, synthetic construct; identical to SEQ ID NO: 1668
  source 1..36: mol_type = other DNA

SEQ ID NO: 2066 - DNA, 36 bp, synthetic construct; identical to SEQ ID NO: 1655
  source 1..36: mol_type = other DNA

SEQ ID NO: 2067 - DNA, 36 bp, synthetic construct
  source 1..36: mol_type = other DNA
gtttcaatatagtatacaatctctactatagtaaat

SEQ ID NO: 2068 - DNA, 36 bp, synthetic construct; identical to SEQ ID NO: 1811
  source 1..36: mol_type = other DNA

SEQ ID NO: 2069 - DNA, 36 bp, synthetic construct; identical to SEQ ID NO: 1668
  source 1..36: mol_type = other DNA

SEQ ID NO: 2070 - DNA, 36 bp, synthetic construct; identical to SEQ ID NO: 1668
  source 1..36: mol_type = other DNA

SEQ ID NO: 2071 - DNA, 36 bp, synthetic construct
  source 1..36: mol_type = other DNA
atctacaacagtagaaattattaaaggttatttgcc

SEQ ID NO: 2072 - DNA, 36 bp, synthetic construct; identical to SEQ ID NO: 1811
  source 1..36: mol_type = other DNA

SEQ ID NO: 2073 - DNA, 36 bp, synthetic construct; identical to SEQ ID NO: 1668
  source 1..36: mol_type = other DNA

SEQ ID NO: 2074 - DNA, 36 bp, synthetic construct; identical to SEQ ID NO: 1655
  source 1..36: mol_type = other DNA

SEQ ID NO: 2075 - DNA, 36 bp, synthetic construct; identical to SEQ ID NO: 1668
  source 1..36: mol_type = other DNA

SEQ ID NO: 2076 - DNA, 36 bp, synthetic construct
  source 1..36: mol_type = other DNA
gtgtcagtcgttcaggcgcgaatcggctactgcaac

SEQ ID NO: 2077 - DNA, 36 bp, synthetic construct
  source 1..36: mol_type = other DNA
atctacaacagtagaaattaaaagggattattaatc

SEQ ID NO: 2078 - DNA, 36 bp, synthetic construct
  source 1..36: mol_type = other DNA
atctacaatagtagaaattctaagggttgattaaac

SEQ ID NO: 2079 - DNA, 36 bp, synthetic construct; identical to SEQ ID NO: 1655
  source 1..36: mol_type = other DNA

SEQ ID NO: 2080 - DNA, 36 bp, synthetic construct
  source 1..36: mol_type = other DNA
atctacaatagtagaaatttaaaagagcccatagac

SEQ ID NO: 2081 - DNA, 36 bp, synthetic construct
  source 1..36: mol_type = other DNA
atctacgagagtagaaattatgtaggccttatagcc

SEQ ID NO: 2082 - DNA, 36 bp, synthetic construct
  source 1..36: mol_type = other DNA
ggttttatcctcctagtaatttctactattgtagat

SEQ ID NO: 2083 - DNA, 36 bp, synthetic construct
  source 1..36: mol_type = other DNA
acctacaagagtaggtatttttatattcccttaaac

SEQ ID NO: 2084 - DNA, 36 bp, synthetic construct
  source 1..36: mol_type = other DNA
acctacaagagtaggtatttttatattcctttaaac

SEQ ID NO: 2085 - DNA, 36 bp, synthetic construct
  source 1..36: mol_type = other DNA
gataaataatcccttttaatttctactattgtagat

SEQ ID NO: 2086 - DNA, 36 bp, synthetic construct
  source 1..36: mol_type = other DNA
atctacaaaagtagaaatttcttattggtaatagag

SEQ ID NO: 2087 - DNA, 36 bp, synthetic construct; identical to SEQ ID NO: 2086
  source 1..36: mol_type = other DNA

SEQ ID NO: 2088 - DNA, 36 bp, synthetic construct
  source 1..36: mol_type = other DNA
atctacaatagtagaaattactagagtcttatagac

SEQ ID NO: 2089 - DNA, 38 bp, synthetic construct
  source 1..38: mol_type = other DNA
atctacaatagtagaaatttaatatggtcttacaccgg

SEQ ID NO: 2090 - DNA, 36 bp, synthetic construct
  source 1..36: mol_type = other DNA
atctacaatagtagaaatttcaattggtatttcaac

SEQ ID NO: 2091 - DNA, 36 bp, synthetic construct
  source 1..36: mol_type = other DNA
atctacactgagtagaaatcatgaatatgttttgac

SEQ ID NO: 2092 - DNA, 35 bp, synthetic construct
  source 1..35: mol_type = other DNA
ggagaagctcctgaagttttaaaaagagtgtggcg

SEQ ID NO: 2093 - DNA, 36 bp, synthetic construct
  source 1..36: mol_type = other DNA
atctacaacagtagaaatttaatatcatgtatgaac

SEQ ID NO: 2094 - DNA, 36 bp, synthetic construct
  source 1..36: mol_type = other DNA
atctacacaagtagaaattacaaggaacctttagac

SEQ ID NO: 2095 - DNA, 36 bp, synthetic construct
  source 1..36: mol_type = other DNA
atctacaatagtagaaattaaattaggcgtttagcc

SEQ ID NO: 2096 - DNA, 36 bp, synthetic construct
  source 1..36: mol_type = other DNA
atctacaatagtagaaatttatataaggcattaaac

SEQ ID NO: 2097 - DNA, 37 bp, synthetic construct
  source 1..37: mol_type = other DNA
atctacaatagtagaaattaaatcggcttcctagcct

SEQ ID NO: 2098 - DNA, 36 bp, synthetic construct
  source 1..36: mol_type = other DNA
gtttaatagctgaaataaatttctactgttgtagat

SEQ ID NO: 2099 - DNA, 36 bp, synthetic construct; identical to SEQ ID NO: 1693
  source 1..36: mol_type = other DNA

SEQ ID NO: 2100 - DNA, 36 bp, synthetic construct; identical to SEQ ID NO: 2098
  source 1..36: mol_type = other DNA

SEQ ID NO: 2101 - DNA, 24 bp, synthetic construct
  source 1..24: mol_type = other DNA
gtagaaattcatttggcttattag

SEQ ID NO: 2102 - DNA, 36 bp, synthetic construct; identical to SEQ ID NO: 1693
  source 1..36: mol_type = other DNA

SEQ ID NO: 2103 - DNA, 36 bp, synthetic construct
  source 1..36: mol_type = other DNA
atctacacatagtagaaattacttagtcatatagac

SEQ ID NO: 2104 - DNA, 36 bp, synthetic construct
  source 1..36: mol_type = other DNA
atctacattagtagaaattgaccttatgaattagac

SEQ ID NO: 2105 - DNA, 36 bp, synthetic construct
  source 1..36: mol_type = other DNA
gtctaaaactcattactaatttctacttgtgtagat

SEQ ID NO: 2106 - DNA, 36 bp, synthetic construct
  source 1..36: mol_type = other DNA
atctacaatagtagaaattataatgtgctaatagcc

SEQ ID NO: 2107 - DNA, 36 bp, synthetic construct
  source 1..36: mol_type = other DNA
atctacaatagtagaaattattataggtttttaaac

SEQ ID NO: 2108 - DNA, 36 bp, synthetic construct
  source 1..36: mol_type = other DNA
gtctaatagacctattaaatttctacttttgtagat

SEQ ID NO: 2109 - DNA, 36 bp, synthetic construct
  source 1..36: mol_type = other DNA
atctaccgaagtagaaattactatctaatgatagag

SEQ ID NO: 2110 - DNA, 36 bp, synthetic construct
  source 1..36: mol_type = other DNA
atctacaacagtagaaattatattaaggtattaaac

SEQ ID NO: 2111 - DNA, 38 bp, synthetic construct
  source 1..38: mol_type = other DNA
gtctaatataccctttaaatttctactattgtagatca

SEQ ID NO: 2112 - DNA, 36 bp, synthetic construct
  source 1..36: mol_type = other DNA
ggcaagtaaccttacataatttctactgttgtagat

SEQ ID NO: 2113 - DNA, 36 bp, synthetic construct
  source 1..36: mol_type = other DNA
atctacaatagtagaaattaataggtcacattagac

SEQ ID NO: 2114 - DNA, 36 bp, synthetic construct; identical to SEQ ID NO: 2109
  source 1..36: mol_type = other DNA

SEQ ID NO: 2115 - DNA, 36 bp, synthetic construct
  source 1..36: mol_type = other DNA
ggcgcgcaggccagcgcgccattgatcgactgacac

SEQ ID NO: 2116 - DNA, 36 bp, synthetic construct; identical to SEQ ID NO: 1648
  source 1..36: mol_type = other DNA

SEQ ID NO: 2117 - DNA, 36 bp, synthetic construct; identical to SEQ ID NO: 1996
  source 1..36: mol_type = other DNA

SEQ ID NO: 2118 - DNA, 36 bp, synthetic construct
  source 1..36: mol_type = other DNA
atctacaatagtagacattcttatgtatctaacatc

SEQ ID NO: 2119 - DNA, 36 bp, synthetic construct
  source 1..36: mol_type = other DNA
gtctataaggactatttaatttctactattgtagat

SEQ ID NO: 2120 - DNA, 36 bp, synthetic construct
  source 1..36: mol_type = other DNA
ctctatcattagatagtaatttctacttctgtagat

SEQ ID NO: 2121 - DNA, 36 bp, synthetic construct; identical to SEQ ID NO: 2120
  source 1..36: mol_type = other DNA

SEQ ID NO: 2122 - DNA, 36 bp, synthetic construct
  source 1..36: mol_type = other DNA
atctacaatagtagaaattaaaccagtcgattagac

SEQ ID NO: 2123 - DNA, 36 bp, synthetic construct
  source 1..36: mol_type = other DNA
atctacaacagtagaaattattttcatattctcagc

SEQ ID NO: 2124 - DNA, 36 bp, synthetic construct
  source 1..36: mol_type = other DNA
gtctagaagactttgataatttctactattgtagat

SEQ ID NO: 2125 - DNA, 35 bp, synthetic construct
  source 1..35: mol_type = other DNA
cctgcaacagcaggcatttatttgttccttataac

SEQ ID NO: 2126 - DNA, 36 bp, synthetic construct
  source 1..36: mol_type = other DNA
atctacaaaagtagaaattaaatatacgaattaaac

SEQ ID NO: 2127 - DNA, 36 bp, synthetic construct
  source 1..36: mol_type = other DNA
ctctatcattagatagtaatttctacttatgtagat

SEQ ID NO: 2128 - DNA, 36 bp, synthetic construct
  source 1..36: mol_type = other DNA
atctacaatagtagaaattaatgagtctgattagac

SEQ ID NO: 2129 - DNA, 36 bp, synthetic construct
  source 1..36: mol_type = other DNA
ccgccacaatctctttcccatcgcgggggctgcggc

SEQ ID NO: 2130 - DNA, 36 bp, synthetic construct; identical to SEQ ID NO: 1766
  source 1..36: mol_type = other DNA

SEQ ID NO: 2131 - DNA, 36 bp, synthetic construct
  source 1..36: mol_type = other DNA
atttgaaagcatattttaatttctactattgtagat

SEQ ID NO: 2132 - DNA, 36 bp, synthetic construct
  source 1..36: mol_type = other DNA
gttgagaagaataatgaaatgtctgctattgcagat

SEQ ID NO: 2133 - DNA, 36 bp, synthetic construct
  source 1..36: mol_type = other DNA
atctacaatagtagaaattataaaaggcctatagcc

SEQ ID NO: 2134 - DNA, 36 bp, synthetic construct
  source 1..36: mol_type = other DNA
ctctatcattcgataggaatttctacttgtgtagat

SEQ ID NO: 2135 - DNA, 37 bp, synthetic construct
  source 1..37: mol_type = other DNA
aatctacaaaagtagaaatagggtatcagcaatagag

SEQ ID NO: 2136 - DNA, 36 bp, synthetic construct; identical to SEQ ID NO: 1743
  source 1..36: mol_type = other DNA

SEQ ID NO: 2137 - DNA, 36 bp, synthetic construct
  source 1..36: mol_type = other DNA
cttgttgtgtatctaatgattttaccaaaccacaac

SEQ ID NO: 2138 - DNA, 36 bp, synthetic construct
  source 1..36: mol_type = other DNA
atctacaatagtagaaatttagaataagtattaaac

SEQ ID NO: 2139 - DNA, 36 bp, synthetic construct
  source 1..36: mol_type = other DNA
ggcaaagaatccatttgaatttctactgttgtagat

SEQ ID NO: 2140 - DNA, 35 bp, synthetic construct
  source 1..35: mol_type = other DNA
atctacatggagtagaaattcgaatgagttttgag

SEQ ID NO: 2141 - DNA, 35 bp, synthetic construct
  source 1..35: mol_type = other DNA
ctcaaaactcattcgaatttctactgtgtgtagat

SEQ ID NO: 2142 - DNA, 37 bp, synthetic construct
  source 1..37: mol_type = other DNA
atctacaatagtagaaattaaaaggggttatctatcc

SEQ ID NO: 2143 - DNA, 36 bp, synthetic construct
  source 1..36: mol_type = other DNA
atctacaatagtagaaattcatagtctcttttagac

SEQ ID NO: 2144 - DNA, 37 bp, synthetic construct; identical to SEQ ID NO: 2142
  source 1..37: mol_type = other DNA

SEQ ID NO: 2145 - DNA, 36 bp, synthetic construct; identical to SEQ ID NO: 2143
  source 1..36: mol_type = other DNA

SEQ ID NO: 2146 - DNA, 36 bp, synthetic construct
  source 1..36: mol_type = other DNA
gtctatatggctaagtaatttctactatgtgtagat

SEQ ID NO: 2147 - DNA, 36 bp, synthetic construct
  source 1..36: mol_type = other DNA
gctgtaagagcatataaaatttctactattgtagat

SEQ ID NO: 2148 - DNA, 36 bp, synthetic construct
  source 1..36: mol_type = other DNA
atctacaatagtagaaattctatatgctcttacagc

SEQ ID NO: 2149 - DNA, 36 bp, synthetic construct; identical to SEQ ID NO: 2148
  source 1..36: mol_type = other DNA

SEQ ID NO: 2150 - DNA, 36 bp, synthetic construct
  source 1..36: mol_type = other DNA
gctgtaagagcatatagaatttctactattgtagat

SEQ ID NO: 2151 - DNA, 36 bp, synthetic construct; identical to SEQ ID NO: 2150
  source 1..36: mol_type = other DNA

SEQ ID NO: 2152 - DNA, 37 bp, synthetic construct
  source 1..37: mol_type = other DNA
gctgtaagagcatatagaatttctactattgtagatc

SEQ ID NO: 2153 - DNA, 36 bp, synthetic construct
  source 1..36: mol_type = other DNA
atctacaatagtagaaattcagaccaatggtcagac

SEQ ID NO: 2154 - DNA, 36 bp, synthetic construct
  source 1..36: mol_type = other DNA
aaatctacaacagtagaaattgttttatccttttag

SEQ ID NO: 2155 - DNA, 36 bp, synthetic construct; identical to SEQ ID NO: 1618
  source 1..36: mol_type = other DNA

SEQ ID NO: 2156 - DNA, 36 bp, synthetic construct; identical to SEQ ID NO: 1618
  source 1..36: mol_type = other DNA

SEQ ID NO: 2157 - DNA, 36 bp, synthetic construct; identical to SEQ ID NO: 1678
  source 1..36: mol_type = other DNA

SEQ ID NO: 2158 - DNA, 36 bp, synthetic construct
  source 1..36: mol_type = other DNA
atctacacatagtagaaattactttgtcatatagac

SEQ ID NO: 2159 - DNA, 36 bp, synthetic construct; identical to SEQ ID NO: 1618
  source 1..36: mol_type = other DNA

SEQ ID NO: 2160 - DNA, 36 bp, synthetic construct; identical to SEQ ID NO: 1678
  source 1..36: mol_type = other DNA

SEQ ID NO: 2161 - DNA, 36 bp, synthetic construct; identical to SEQ ID NO: 1618
  source 1..36: mol_type = other DNA

SEQ ID NO: 2162 - DNA, 36 bp, synthetic construct; identical to SEQ ID NO: 1618
  source 1..36: mol_type = other DNA

SEQ ID NO: 2163 - DNA, 36 bp, synthetic construct; identical to SEQ ID NO: 1678
  source 1..36: mol_type = other DNA

SEQ ID NO: 2164 - DNA, 36 bp, synthetic construct; identical to SEQ ID NO: 1618
  source 1..36: mol_type = other DNA

SEQ ID NO: 2165 - DNA, 36 bp, synthetic construct; identical to SEQ ID NO: 1678
  source 1..36: mol_type = other DNA

SEQ ID NO: 2166 - DNA, 36 bp, synthetic construct; identical to SEQ ID NO: 1678
  source 1..36: mol_type = other DNA

SEQ ID NO: 2167 - DNA, 35 bp, synthetic construct
  source 1..35: mol_type = other DNA
tttaataaccctatataatttctactattgtagat

SEQ ID NO: 2168 - DNA, 36 bp, synthetic construct; identical to SEQ ID NO: 1678
  source 1..36: mol_type = other DNA

SEQ ID NO: 2169 - DNA, 36 bp, synthetic construct; identical to SEQ ID NO: 1618
  source 1..36: mol_type = other DNA

SEQ ID NO: 2170 - DNA, 36 bp, synthetic construct; identical to SEQ ID NO: 1618
  source 1..36: mol_type = other DNA

SEQ ID NO: 2171 - DNA, 36 bp, synthetic construct; identical to SEQ ID NO: 1678
  source 1..36: mol_type = other DNA

SEQ ID NO: 2172 - DNA, 36 bp, synthetic construct; identical to SEQ ID NO: 1678
  source 1..36: mol_type = other DNA

SEQ ID NO: 2173 - DNA, 36 bp, synthetic construct; identical to SEQ ID NO: 1618
  source 1..36: mol_type = other DNA

SEQ ID NO: 2174 - DNA, 41 bp, synthetic construct
  source 1..41: mol_type = other DNA
atctatctacaatagtagaaattatatagggttattaaacc

SEQ ID NO: 2175 - DNA, 36 bp, synthetic construct; identical to SEQ ID NO: 2158
  source 1..36: mol_type = other DNA

SEQ ID NO: 2176 - DNA, 36 bp, synthetic construct
  source 1..36: mol_type = other DNA
atctacaacagtagaaattatataaggttacctgac

SEQ ID NO: 2177 - DNA, 29 bp, synthetic construct
  source 1..29: mol_type = other DNA
tttaataaccctatataatttctactatt

SEQ ID NO: 2178 - DNA, 36 bp, synthetic construct; identical to SEQ ID NO: 1618
  source 1..36: mol_type = other DNA

SEQ ID NO: 2179 - DNA, 36 bp, synthetic construct; identical to SEQ ID NO: 1678
  source 1..36: mol_type = other DNA

SEQ ID NO: 2180 - DNA, 36 bp, synthetic construct; identical to SEQ ID NO: 1618
  source 1..36: mol_type = other DNA

SEQ ID NO: 2181 - DNA, 36 bp, synthetic construct; identical to SEQ ID NO: 1678
  source 1..36: mol_type = other DNA

SEQ ID NO: 2182 - DNA, 41 bp, synthetic construct
  source 1..41: mol_type = other DNA
ggtttaataaccctatataatttctactattgtagatagat

SEQ ID NO: 2183 - DNA, 36 bp, synthetic construct; identical to SEQ ID NO: 2103
  source 1..36: mol_type = other DNA

SEQ ID NO: 2184 - DNA, 36 bp, synthetic construct; identical to SEQ ID NO: 2103
  source 1..36: mol_type = other DNA

SEQ ID NO: 2185 - DNA, 36 bp, synthetic construct; identical to SEQ ID NO: 1678
  source 1..36: mol_type = other DNA

SEQ ID NO: 2186 - DNA, 36 bp, synthetic construct; identical to SEQ ID NO: 1678
  source 1..36: mol_type = other DNA

SEQ ID NO: 2187 - DNA, 36 bp, synthetic construct; identical to SEQ ID NO: 1678
  source 1..36: mol_type = other DNA

SEQ ID NO: 2188 - DNA, 37 bp, synthetic construct
  source 1..37: mol_type = other DNA
atctacaatagtagaaattatatagggttattaaacc

SEQ ID NO: 2189 - DNA, 36 bp, synthetic construct; identical to SEQ ID NO: 1678
  source 1..36: mol_type = other DNA

SEQ ID NO: 2190 - DNA, 36 bp, synthetic construct; identical to SEQ ID NO: 1618
  source 1..36: mol_type = other DNA

SEQ ID NO: 2191 - DNA, 36 bp, synthetic construct; identical to SEQ ID NO: 1678
  source 1..36: mol_type = other DNA

SEQ ID NO: 2192 - DNA, 36 bp, synthetic construct; identical to SEQ ID NO: 1678
  source 1..36: mol_type = other DNA

SEQ ID NO: 2193 - DNA, 36 bp, synthetic construct; identical to SEQ ID NO: 1618
  source 1..36: mol_type = other DNA

SEQ ID NO: 2194 - DNA, 36 bp, synthetic construct; identical to SEQ ID NO: 1618
  source 1..36: mol_type = other DNA

SEQ ID NO: 2195 - DNA, 36 bp, synthetic construct
  source 1..36: mol_type = other DNA
gtctatatgactaagtaatttctactatgtgtagat

SEQ ID NO: 2196 - DNA, 36 bp, synthetic construct; identical to SEQ ID NO: 1678
  source 1..36: mol_type = other DNA

SEQ ID NO: 2197 - DNA, 34 bp, synthetic construct
  source 1..34: mol_type = other DNA
atctacaatagtagaaattatatagggttattaa

SEQ ID NO: 2198 - DNA, 36 bp, synthetic construct; identical to SEQ ID NO: 1618
  source 1..36: mol_type = other DNA

SEQ ID NO: 2199 - DNA, 36 bp, synthetic construct; identical to SEQ ID NO: 1618
  source 1..36: mol_type = other DNA

SEQ ID NO: 2200 - DNA, 36 bp, synthetic construct; identical to SEQ ID NO: 1678
  source 1..36: mol_type = other DNA

SEQ ID NO: 2201 - DNA, 36 bp, synthetic construct; identical to SEQ ID NO: 1618
  source 1..36: mol_type = other DNA

SEQ ID NO: 2202 - DNA, 36 bp, synthetic construct; identical to SEQ ID NO: 2158
  source 1..36: mol_type = other DNA

SEQ ID NO: 2203 - DNA, 36 bp, synthetic construct; identical to SEQ ID NO: 1678
  source 1..36: mol_type = other DNA

SEQ ID NO: 2204 - DNA, 36 bp, synthetic construct; identical to SEQ ID NO: 1618
  source 1..36: mol_type = other DNA

SEQ ID NO: 2205 - DNA, 36 bp, synthetic construct; identical to SEQ ID NO: 1618
  source 1..36: mol_type = other DNA

SEQ ID NO: 2206 - DNA, 36 bp, synthetic construct; identical to SEQ ID NO: 1618
  source 1..36: mol_type = other DNA

SEQ ID NO: 2207 - DNA, 36 bp, synthetic construct; identical to SEQ ID NO: 1618
  source 1..36: mol_type = other DNA

SEQ ID NO: 2208 - DNA, 36 bp, synthetic construct; identical to SEQ ID NO: 1618
  source 1..36: mol_type = other DNA

SEQ ID NO: 2209 - DNA, 36 bp, synthetic construct; identical to SEQ ID NO: 1678
  source 1..36: mol_type = other DNA

SEQ ID NO: 2210 - DNA, 36 bp, synthetic construct; identical to SEQ ID NO: 2195
  source 1..36: mol_type = other DNA

SEQ ID NO: 2211 - DNA, 36 bp, synthetic construct; identical to SEQ ID NO: 1678
  source 1..36: mol_type = other DNA

SEQ ID NO: 2212 - DNA, 36 bp, synthetic construct; identical to SEQ ID NO: 2103
  source 1..36: mol_type = other DNA

SEQ ID NO: 2213 - DNA, 36 bp, synthetic construct; identical to SEQ ID NO: 1662
  source 1..36: mol_type = other DNA

SEQ ID NO: 2214 - DNA, 37 bp, synthetic construct; identical to SEQ ID NO: 2004
  source 1..37: mol_type = other DNA

SEQ ID NO: 2215 - DNA, 36 bp, synthetic construct; identical to SEQ ID NO: 1618
  source 1..36: mol_type = other DNA

SEQ ID NO: 2216 - DNA, 36 bp, synthetic construct; identical to SEQ ID NO: 1678
  source 1..36: mol_type = other DNA

SEQ ID NO: 2217 - DNA, 36 bp, synthetic construct; identical to SEQ ID NO: 1618
  source 1..36: mol_type = other DNA

SEQ ID NO: 2218 - DNA, 36 bp, synthetic construct; identical to SEQ ID NO: 1678
  source 1..36: mol_type = other DNA

SEQ ID NO: 2219 - DNA, 36 bp, synthetic construct; identical to SEQ ID NO: 1678
  source 1..36: mol_type = other DNA

SEQ ID NO: 2220 - DNA, 36 bp, synthetic construct; identical to SEQ ID NO: 1678
  source 1..36: mol_type = other DNA

SEQ ID NO: 2221 - DNA, 36 bp, synthetic construct; identical to SEQ ID NO: 1618
  source 1..36: mol_type = other DNA

SEQ ID NO: 2222 - DNA, 35 bp, synthetic construct
  source 1..35: mol_type = other DNA
atctacaatagtagaaattatatagggttattaaa

SEQ ID NO: 2223 - DNA, 36 bp, synthetic construct; identical to SEQ ID NO: 1678
  source 1..36: mol_type = other DNA

SEQ ID NO: 2224 - DNA, 36 bp, synthetic construct; identical to SEQ ID NO: 1618
  source 1..36: mol_type = other DNA

SEQ ID NO: 2225 - DNA, 36 bp, synthetic construct; identical to SEQ ID NO: 1662
  source 1..36: mol_type = other DNA

SEQ ID NO: 2226 - DNA, 36 bp, synthetic construct; identical to SEQ ID NO: 1678
  source 1..36: mol_type = other DNA

SEQ ID NO: 2227 - DNA, 36 bp, synthetic construct; identical to SEQ ID NO: 1678
  source 1..36: mol_type = other DNA

SEQ ID NO: 2228 - DNA, 41 bp, synthetic construct; identical to SEQ ID NO: 2182
  source 1..41: mol_type = other DNA

SEQ ID NO: 2229 - DNA, 36 bp, synthetic construct; identical to SEQ ID NO: 1618
  source 1..36: mol_type = other DNA

SEQ ID NO: 2230 - DNA, 36 bp, synthetic construct
  source 1..36: mol_type = other DNA
atctacaatagtagaaattaaattagtcttatagac

SEQ ID NO: 2231 - DNA, 36 bp, synthetic construct; identical to SEQ ID NO: 1618
  source 1..36: mol_type = other DNA

SEQ ID NO: 2232 - DNA, 36 bp, synthetic construct; identical to SEQ ID NO: 1678
  source 1..36: mol_type = other DNA

SEQ ID NO: 2233 - DNA, 36 bp, synthetic construct; identical to SEQ ID NO: 1678
  source 1..36: mol_type = other DNA

SEQ ID NO: 2234 - DNA, 36 bp, synthetic construct
  source 1..36: mol_type = other DNA
gtttaagagacctttaaaatttctactattgtagat

SEQ ID NO: 2235 - DNA, 22 bp, synthetic construct
  source 1..22: mol_type = other DNA
atctacaacagtagaaatttaa

SEQ ID NO: 2236 - DNA, 36 bp, synthetic construct; identical to SEQ ID NO: 1678
  source 1..36: mol_type = other DNA

SEQ ID NO: 2237 - DNA, 36 bp, synthetic construct
  source 1..36: mol_type = other DNA
atctacaatagtagaaattttaaaggtctcttaaat

SEQ ID NO: 2238 - DNA, 30 bp, synthetic construct
  source 1..30: mol_type = other DNA
atctacaatagtagaaatttaatatgatct

SEQ ID NO: 2239 - DNA, 37 bp, synthetic construct
  source 1..37: mol_type = other DNA
tggtgtaagaccatattaaatttctactattgtagat

SEQ ID NO: 2240 - DNA, 37 bp, synthetic construct; identical to SEQ ID NO: 2004
  source 1..37: mol_type = other DNA

SEQ ID NO: 2241 - DNA, 36 bp, synthetic construct; identical to SEQ ID NO: 2195
  source 1..36: mol_type = other DNA

SEQ ID NO: 2242 - DNA, 36 bp, synthetic construct; identical to SEQ ID NO: 2195
  source 1..36: mol_type = other DNA

SEQ ID NO: 2243 - DNA, 36 bp, synthetic construct
  source 1..36: mol_type = other DNA
atctacaaaagtagaaatcttatatagtcattagac

SEQ ID NO: 2244 - DNA, 35 bp, synthetic construct; identical to SEQ ID NO: 1992
  source 1..35: mol_type = other DNA

SEQ ID NO: 2245 - DNA, 31 bp, synthetic construct
  source 1..31: mol_type = other DNA
caatagtagaaattagttggtctcaatagac

SEQ ID NO: 2246 - DNA, 36 bp, synthetic construct
  source 1..36: mol_type = other DNA
atctacaacagtagaaatttcaaggttctataaaac

SEQ ID NO: 2247 - DNA, 36 bp, synthetic construct
  source 1..36: mol_type = other DNA
gattaatactcccttataatttctactgttgtagat

SEQ ID NO: 2248 - DNA, 36 bp, synthetic construct; identical to SEQ ID NO: 1941
  source 1..36: mol_type = other DNA

SEQ ID NO: 2249 - DNA, 36 bp, synthetic construct
  source 1..36: mol_type = other DNA
atctacaatagtagaaattttgtatgttcatacatt

SEQ ID NO: 2250 - DNA, 36 bp, synthetic construct
  source 1..36: mol_type = other DNA
atctacaatagtagaaattaatacatgcctatagag

SEQ ID NO: 2251 - DNA, 29 bp, synthetic construct
  source 1..29: mol_type = other DNA
agaataaaagaatttctatactattagat

SEQ ID NO: 2252 - DNA, 21 bp, synthetic construct
  source 1..21: mol_type = other DNA
ttaatttctactattgtagat

SEQ ID NO: 2253 - DNA, 36 bp, synthetic construct
  source 1..36: mol_type = other DNA
gcctataaggccaatataatttctactatcgtagat

SEQ ID NO: 2254 - DNA, 36 bp, synthetic construct
  source 1..36: mol_type = other DNA
ggctagaaagccttcaaaatttctactattgtagat

SEQ ID NO: 2255 - DNA, 36 bp, synthetic construct; identical to SEQ ID NO: 2195
  source 1..36: mol_type = other DNA

SEQ ID NO: 2256 - DNA, 36 bp, synthetic construct
  source 1..36: mol_type = other DNA
atctacaatagtagaaattatattgaggctattgcc

SEQ ID NO: 2257 - DNA, 38 bp, synthetic construct
  source 1..38: mol_type = other DNA
caatctacaatagtagaaatttgtgtgcctttgtaggc

SEQ ID NO: 2258 - DNA, 36 bp, synthetic construct
  source 1..36: mol_type = other DNA
gtttaaaacctcatttaaatttctactattgtagat

SEQ ID NO: 2259 - DNA, 34 bp, synthetic construct
  source 1..34: mol_type = other DNA
atctacaatagtagaaattatttacgtttctcaa

SEQ ID NO: 2260 - DNA, 36 bp, synthetic construct
  source 1..36: mol_type = other DNA
gtttcgagaaccttaaaaatttctactattgtagat

SEQ ID NO: 2261 - DNA, 36 bp, synthetic construct; identical to SEQ ID NO: 2258
  source 1..36: mol_type = other DNA

SEQ ID NO: 2262 - DNA, 36 bp, synthetic construct
  source 1..36: mol_type = other DNA
gactaatgtctccagttaatttctactattgtagat

SEQ ID NO: 2263 - DNA, 37 bp, synthetic construct
  source 1..37: mol_type = other DNA
gtctaatccctatatcaaatttctacttttgtagatt

SEQ ID NO: 2264 - DNA, 36 bp, synthetic construct; identical to SEQ ID NO: 1655
  source 1..36: mol_type = other DNA

SEQ ID NO: 2265 - DNA, 36 bp, synthetic construct
  source 1..36: mol_type = other DNA
gtctgaatagcgccattaatttctactattgtagat

SEQ ID NO: 2266 - DNA, 36 bp, synthetic construct
  source 1..36: mol_type = other DNA
ggctataaagccaatttaatttctactattgtagat

SEQ ID NO: 2267 - DNA, 36 bp, synthetic construct; identical to SEQ ID NO: 1655
  source 1..36: mol_type = other DNA

SEQ ID NO: 2268 - DNA, 36 bp, synthetic construct
  source 1..36: mol_type = other DNA
atctacaatagtagaaattagtttggctttatagcc

SEQ ID NO: 2269 - DNA, 35 bp, synthetic construct; identical to SEQ ID NO: 2051
  source 1..35: mol_type = other DNA

SEQ ID NO: 2270 - DNA, 36 bp, synthetic construct; identical to SEQ ID NO: 1655
  source 1..36: mol_type = other DNA

SEQ ID NO: 2271 - DNA, 36 bp, synthetic construct
  source 1..36: mol_type = other DNA
gtctgaatagcgcccttaatttctactattgtagat

SEQ ID NO: 2272 - DNA, 36 bp, synthetic construct
  source 1..36: mol_type = other DNA
atctacaatagtagaaattctaatggctttatagcc

SEQ ID NO: 2273 - DNA, 36 bp, synthetic construct
  source 1..36: mol_type = other DNA
atctacaatagtagaaattactaaggctttatagcc

SEQ ID NO: 2274 - DNA, 35 bp, synthetic construct; identical to SEQ ID NO: 1953
  source 1..35: mol_type = other DNA

SEQ ID NO: 2275 - DNA, 36 bp, synthetic construct
  source 1..36: mol_type = other DNA
ggctataaagccattagaatttctactttcgtagat

SEQ ID NO: 2276 - DNA, 36 bp, synthetic construct
  source 1..36: mol_type = other DNA
gtctaaacgaccggtctaatttctactgttgtagat

SEQ ID NO: 2277 - DNA, 36 bp, synthetic construct; identical to SEQ ID NO: 1938
  source 1..36: mol_type = other DNA

SEQ ID NO: 2278 - DNA, 36 bp, synthetic construct
  source 1..36: mol_type = other DNA
atctacaatagtagaaattattcgagtcctttagac

SEQ ID NO: 2279 - DNA, 36 bp, synthetic construct
  source 1..36: mol_type = other DNA
ggctataaagctaatataatttctactattgtagat

SEQ ID NO: 2280 - DNA, 36 bp, synthetic construct; identical to SEQ ID NO: 2106
  source 1..36: mol_type = other DNA

SEQ ID NO: 2281 - DNA, 36 bp, synthetic construct
  source 1..36: mol_type = other DNA
atctacgatagtagaaattttatatgctcttacagc

SEQ ID NO: 2282 - DNA, 36 bp, synthetic construct; identical to SEQ ID NO: 1655
  source 1..36: mol_type = other DNA

SEQ ID NO: 2283 - DNA, 36 bp, synthetic construct
  source 1..36: mol_type = other DNA
atctacaatagtagaaattatacttaccttctaggc

SEQ ID NO: 2284 - DNA, 36 bp, synthetic construct
  source 1..36: mol_type = other DNA
gcctatgaggctaatataatttctactatcgtagat

SEQ ID NO: 2285 - DNA, 37 bp, synthetic construct
  source 1..37: mol_type = other DNA
agctgtaagagcatataaaatttctactattgtagat

SEQ ID NO: 2286 - DNA, 36 bp, synthetic construct
  source 1..36: mol_type = other DNA
ggctattagcacattataatttctactattgtagat

SEQ ID NO: 2287 - DNA, 36 bp, synthetic construct; identical to SEQ ID NO: 2253
  source 1..36: mol_type = other DNA

SEQ ID NO: 2288 - DNA, 36 bp, synthetic construct
  source 1..36: mol_type = other DNA
atctacaatagtagaaattttatatgctcttacagc

SEQ ID NO: 2289 - DNA, 36 bp, synthetic construct
  source 1..36: mol_type = other DNA
atctacaatagtagaaattatttttgtctgctagac

SEQ ID NO: 2290 - DNA, 36 bp, synthetic construct
  source 1..36: mol_type = other DNA
gtctatacagacactttaatttctactattgtagat

SEQ ID NO: 2291 - DNA, 36 bp, synthetic construct
  source 1..36: mol_type = other DNA
gtctatatgacacattaatttctactattcgtagat

SEQ ID NO: 2292 - DNA, 36 bp, synthetic construct; identical to SEQ ID NO: 1735
  source 1..36: mol_type = other DNA

SEQ ID NO: 2293 - DNA, 36 bp, synthetic construct; identical to SEQ ID NO: 1655
  source 1..36: mol_type = other DNA

SEQ ID NO: 2294 - DNA, 36 bp, synthetic construct
  source 1..36: mol_type = other DNA
atctacaatagtagaaattttattggcattatagcc

SEQ ID NO: 2295 - DNA, 36 bp, synthetic construct
  source 1..36: mol_type = other DNA
atctacagtagtagaaattattgatggcttatagcc

SEQ ID NO: 2296 - DNA, 36 bp, synthetic construct; identical to SEQ ID NO: 2291
  source 1..36: mol_type = other DNA

SEQ ID NO: 2297 - DNA, 36 bp, synthetic construct
  source 1..36: mol_type = other DNA
atctacaatagtagaaatttaaaatgtctttaaaac

SEQ ID NO: 2298 - DNA, 36 bp, synthetic construct
  source 1..36: mol_type = other DNA
atctacgagagtagaaattaaattggccttatagcc

SEQ ID NO: 2299 - DNA, 36 bp, synthetic construct; identical to SEQ ID NO: 1906
  source 1..36: mol_type = other DNA

SEQ ID NO: 2300 - DNA, 36 bp, synthetic construct; identical to SEQ ID NO: 1918
  source 1..36: mol_type = other DNA

SEQ ID NO: 2301 - DNA, 36 bp, synthetic construct; identical to SEQ ID NO: 1906
  source 1..36: mol_type = other DNA

SEQ ID NO: 2302 - DNA, 36 bp, synthetic construct
  source 1..36: mol_type = other DNA
atctacaatagtagaaattattgagcctttatagac

SEQ ID NO: 2303 - DNA, 36 bp, synthetic construct
  source 1..36: mol_type = other DNA
ggctataagctttatataatttctactattgtagat

SEQ ID NO: 2304 - DNA, 36 bp, synthetic construct; identical to SEQ ID NO: 2298
  source 1..36: mol_type = other DNA

SEQ ID NO: 2305 - DNA, 36 bp, synthetic construct
  source 1..36: mol_type = other DNA
atctacaacagtagaaatttcaagctattactagcc

SEQ ID NO: 2306 - DNA, 36 bp, synthetic construct; identical to SEQ ID NO: 2305
  source 1..36: mol_type = other DNA

SEQ ID NO: 2307 - DNA, 35 bp, synthetic construct
  source 1..35: mol_type = other DNA
tatctacaatagtagaaattaatactggcttatag

SEQ ID NO: 2308 - DNA, 35 bp, synthetic construct
  source 1..35: mol_type = other DNA
ctataagccagtattaatttctactattgtagata

SEQ ID NO: 2309 - DNA, 36 bp, synthetic construct
  source 1..36: mol_type = other DNA
gtctaaagactcatattaatttctactattgtagat

SEQ ID NO: 2310 - DNA, 36 bp, synthetic construct
  source 1..36: mol_type = other DNA
ggtgtaaatccatagtaaatttctactattgtagat

SEQ ID NO: 2311 - DNA, 37 bp, synthetic construct
  source 1..37: mol_type = other DNA
catctacgatagtagaaattttatatgtacttacaac

SEQ ID NO: 2312 - DNA, 36 bp, synthetic construct
  source 1..36: mol_type = other DNA
atctacaatagtagaaattaagtttggcttatagcc

SEQ ID NO: 2313 - DNA, 36 bp, synthetic construct
  source 1..36: mol_type = other DNA
atctacctaagtagacatttatataaggtcttagac

SEQ ID NO: 2314 - DNA, 36 bp, synthetic construct
  source 1..36: mol_type = other DNA
gtcaaatacagataatacatttctacttttgtagat

SEQ ID NO: 2315 - DNA, 27 bp, synthetic construct
  source 1..27: mol_type = other DNA
agtagaaattttatatgtatttacacc

SEQ ID NO: 2316 - DNA, 23 bp, synthetic construct
  source 1..23: mol_type = other DNA
atctacaatagtagaaattttat

SEQ ID NO: 2317 - DNA, 39 bp, synthetic construct
  source 1..39: mol_type = other DNA
gaatctacaatagtagaaattttatatgtattcacacct

SEQ ID NO: 2318 - DNA, 36 bp, synthetic construct
  source 1..36: mol_type = other DNA
ggtgtaaatacatatataatttctactatcgtagat

SEQ ID NO: 2319 - DNA, 36 bp, synthetic construct
  source 1..36: mol_type = other DNA
gtgccaacagccatccggcgtcactgccagcgccac

SEQ ID NO: 2320 - DNA, 36 bp, synthetic construct; identical to SEQ ID NO: 1891
  source 1..36: mol_type = other DNA

SEQ ID NO: 2321 - DNA, 36 bp, synthetic construct; identical to SEQ ID NO: 1752
  source 1..36: mol_type = other DNA

SEQ ID NO: 2322 - DNA, 36 bp, synthetic construct
  source 1..36: mol_type = other DNA
atctacaatagtagaaattttatatgtatttgcacc

SEQ ID NO: 2323 - DNA, 36 bp, synthetic construct; identical to SEQ ID NO: 1891
  source 1..36: mol_type = other DNA

SEQ ID NO: 2324 - DNA, 36 bp, synthetic construct
  source 1..36: mol_type = other DNA
atctacaatagtagaaattttatatgtatttacacc

SEQ ID NO: 2325 - DNA, 36 bp, synthetic construct
  source 1..36: mol_type = other DNA
atctacaatagtagaaattaataatgtcctatagac

SEQ ID NO: 2326 - DNA, 36 bp, synthetic construct
  source 1..36: mol_type = other DNA
atctacgatagtagaaattttatatgctgatacagc

SEQ ID NO: 2327 - DNA, 36 bp, synthetic construct
  source 1..36: mol_type = other DNA
atctgcaatagcagaaattttactatggtttacacc

SEQ ID NO: 2328 - DNA, 36 bp, synthetic construct; identical to SEQ ID NO: 2327
  source 1..36: mol_type = other DNA

SEQ ID NO: 2329 - DNA, 36 bp, synthetic construct
  source 1..36: mol_type = other DNA
atctacaatagtagaaattaaattggctctatagcc

SEQ ID NO: 2330 - DNA, 36 bp, synthetic construct
  source 1..36: mol_type = other DNA
ggtgttagaccatataaaatttctactattgtagat

SEQ ID NO: 2331 - DNA, 36 bp, synthetic construct
  source 1..36: mol_type = other DNA
gtctaatcctcgaccataatttctactgttgtagat

SEQ ID NO: 2332 - DNA, 36 bp, synthetic construct
  source 1..36: mol_type = other DNA
atctacaatagtagaaattttatctgtccgctagac

SEQ ID NO: 2333 - DNA, 36 bp, synthetic construct; identical to SEQ ID NO: 2332
  source 1..36: mol_type = other DNA

SEQ ID NO: 2334 - DNA, 36 bp, synthetic construct
  source 1..36: mol_type = other DNA
ggctagtaatagctttgaatttctactgttgtagat

SEQ ID NO: 2335 - DNA, 36 bp, synthetic construct
  source 1..36: mol_type = other DNA
gcctagaaggtaagtataatttctactattgtagat

SEQ ID NO: 2336 - DNA, 36 bp, synthetic construct
  source 1..36: mol_type = other DNA
atctgcaatagcagaaattatactatggtttacacc

SEQ ID NO: 2337 - DNA, 36 bp, synthetic construct; identical to SEQ ID NO: 1938
  source 1..36: mol_type = other DNA

SEQ ID NO: 2338 - DNA, 36 bp, synthetic construct; identical to SEQ ID NO: 2327
  source 1..36: mol_type = other DNA

SEQ ID NO: 2339 - DNA, 36 bp, synthetic construct
  source 1..36: mol_type = other DNA
gtctataagactcatataatttctactattgtagat

SEQ ID NO: 2340 - DNA, 30 bp, synthetic construct
  source 1..30: mol_type = other DNA
aatagtagaaattttatatggtcttacacc

SEQ ID NO: 2341 - DNA, 36 bp, synthetic construct
  source 1..36: mol_type = other DNA
gtctgacagacagataaaatttctactattgtagat

SEQ ID NO: 2342 - DNA, 36 bp, synthetic construct
  source 1..36: mol_type = other DNA
atctgcgatagcagaaattttactatggtttacacc

SEQ ID NO: 2343 - DNA, 39 bp, synthetic construct; identical to SEQ ID NO: 1672
  source 1..39: mol_type = other DNA

SEQ ID NO: 2344 - DNA, 36 bp, synthetic construct; identical to SEQ ID NO: 2327
  source 1..36: mol_type = other DNA

SEQ ID NO: 2345 - DNA, 36 bp, synthetic construct
  source 1..36: mol_type = other DNA
ggtgtaaaccatattaaaatttctgctatcgcagat

SEQ ID NO: 2346 - DNA, 36 bp, synthetic construct
  source 1..36: mol_type = other DNA
atctgcaatagcagaaattttactatggtttatacc

SEQ ID NO: 2347 - DNA, 37 bp, synthetic construct
  source 1..37: mol_type = other DNA
catctgcaatagcagaaattttactatggtttacacc

SEQ ID NO: 2348 - DNA, 37 bp, synthetic construct
  source 1..37: mol_type = other DNA
atctacaacagtagaaattatgtgaggttattattcc

SEQ ID NO: 2349 - DNA, 36 bp, synthetic construct
  source 1..36: mol_type = other DNA
atctacaatagtagaaattttgaaggttcttacacc

SEQ ID NO: 2350 - DNA, 37 bp, synthetic construct
  source 1..37: mol_type = other DNA
agttgaataaccttaaagaatttctactagtgtagat

SEQ ID NO: 2351 - DNA, 36 bp, synthetic construct
  source 1..36: mol_type = other DNA
atctacaacagtagaaatttatttggtcttctagac

SEQ ID NO: 2352 - DNA, 36 bp, synthetic construct
  source 1..36: mol_type = other DNA
gtctaaggcttatataaatttctactagttgtagat

SEQ ID NO: 2353 - DNA, 35 bp, synthetic construct
  source 1..35: mol_type = other DNA
tctacaactagtagaaatttatataagccttagac

SEQ ID NO: 2354 - DNA, 36 bp, synthetic construct
  source 1..36: mol_type = other DNA
atctacaatagtagaaattttttatcccgcttaaac

SEQ ID NO: 2355 - DNA, 35 bp, synthetic construct
  source 1..35: mol_type = other DNA
gttttggacccatgtaaatctctactcatgtaggg

SEQ ID NO: 2356 - DNA, 36 bp, synthetic construct
  source 1..36: mol_type = other DNA
atctacaatagtagaaattaattatggcttatagcc

SEQ ID NO: 2357 - DNA, 36 bp, synthetic construct; identical to SEQ ID NO: 1635
  source 1..36: mol_type = other DNA

SEQ ID NO: 2358 - DNA, 36 bp, synthetic construct
  source 1..36: mol_type = other DNA
gactattaggtctttgaaatttctactattgtagat

SEQ ID NO: 2359 - DNA, 35 bp, synthetic construct
  source 1..35: mol_type = other DNA
atctacaacagtagaaattacagagcccctacaga

SEQ ID NO: 2360 - DNA, 36 bp, synthetic construct
  source 1..36: mol_type = other DNA
atctacaacagtagaaattatagagtccctacagac

SEQ ID NO: 2361 - DNA, 37 bp, synthetic construct
  source 1..37: mol_type = other DNA
tatctacaatagtagaaatttataaggacctttaaag

SEQ ID NO: 2362 - DNA, 36 bp, synthetic construct
  source 1..36: mol_type = other DNA
gttgaaactgtaagcggaatgtctactagggtagat

SEQ ID NO: 2363 - DNA, 36 bp, synthetic construct
  source 1..36: mol_type = other DNA
atctacaatagtagaaatttcaaatagctattaaac

SEQ ID NO: 2364 - DNA, 36 bp, synthetic construct
  source 1..36: mol_type = other DNA
atctacaacagtagaaattagggaagattgcaaaac

SEQ ID NO: 2365 - DNA, 36 bp, synthetic construct
  source 1..36: mol_type = other DNA
gtctatagatataaagtaatttctactgttgtagat

SEQ ID NO: 2366 - DNA, 22 bp, synthetic construct
  source 1..22: mol_type = other DNA
taatacctgctgttattgcagg

SEQ ID NO: 2367 - DNA, 36 bp, synthetic construct
  source 1..36: mol_type = other DNA
atctacaatagtagaaatttattagtccctctaaac

SEQ ID NO: 2368 - DNA, 36 bp, synthetic construct
  source 1..36: mol_type = other DNA
atctacaatagtagaaatttttatatcactctaaac

SEQ ID NO: 2369 - DNA, 36 bp, synthetic construct
  source 1..36: mol_type = other DNA
atctaaaaatatagaaattatcttatcctacttaac

SEQ ID NO: 2370 - DNA, 36 bp, synthetic construct; identical to SEQ ID NO: 1653
  source 1..36: mol_type = other DNA

SEQ ID NO: 2371 - DNA, 38 bp, synthetic construct
  source 1..38: mol_type = other DNA
ggtttagggttatttaaaaatttctactattgtagata

SEQ ID NO: 2372 - DNA, 37 bp, synthetic construct
  source 1..37: mol_type = other DNA
atctacaatagtagaaatttttaaataaccctaaacc

SEQ ID NO: 2373 - DNA, 36 bp, synthetic construct
  source 1..36: mol_type = other DNA
gaataataatcccttttaatttctactattgtagat

SEQ ID NO: 2374 - DNA, 36 bp, synthetic construct
  source 1..36: mol_type = other DNA
atctaccttagtagacatttcgcttacagtttcaac

SEQ ID NO: 2375 - DNA, 36 bp, synthetic construct; identical to SEQ ID NO: 2362
  source 1..36: mol_type = other DNA

SEQ ID NO: 2376 - DNA, 36 bp, synthetic construct
  source 1..36: mol_type = other DNA
gtttcctcaaacttccatttaacggactgttggcac

SEQ ID NO: 2377 - DNA, 37 bp, synthetic construct
  source 1..37: mol_type = other DNA
ggctataatgccatattaatttctactgttcgtagat

SEQ ID NO: 2378 - DNA, 26 bp, synthetic construct
  source 1..26: mol_type = other DNA
acctttaaatttctactgttgtagat

SEQ ID NO: 2379 - DNA, 36 bp, synthetic construct
  source 1..36: mol_type = other DNA
gtctaaaggtaccaccaaatttctactgttgtagat

SEQ ID NO: 2380 - DNA, 36 bp, synthetic construct; identical to SEQ ID NO: 1745
  source 1..36: mol_type = other DNA

SEQ ID NO: 2381 - DNA, 36 bp, synthetic construct
  source 1..36: mol_type = other DNA
gtctaaaagacttatttaatttctactattgtagat

SEQ ID NO: 2382 - DNA, 36 bp, synthetic construct
  source 1..36: mol_type = other DNA
atctacaatagtagaaatttgacaattgccttagac

SEQ ID NO: 2383 - DNA, 36 bp, synthetic construct; identical to SEQ ID NO: 1720
  source 1..36: mol_type = other DNA

SEQ ID NO: 2384 - DNA, 26 bp, synthetic construct
  source 1..26: mol_type = other DNA
gtctgatagatcagacattttatatg

SEQ ID NO: 2385 - DNA, 36 bp, synthetic construct
  source 1..36: mol_type = other DNA
atctacaatagtagaaattttatatcctcaaacacc

SEQ ID NO: 2386 - DNA, 36 bp, synthetic construct
  source 1..36: mol_type = other DNA
ggctatagagccaatttaatttctactattgtagat

SEQ ID NO: 2387 - DNA, 36 bp, synthetic construct
  source 1..36: mol_type = other DNA
atctaccctagtagacattccgcttacagtttcaac

SEQ ID NO: 2388 - DNA, 36 bp, synthetic construct
  source 1..36: mol_type = other DNA
gtctagagacaaaagataatttctactattgtagat

SEQ ID NO: 2389 - DNA, 36 bp, synthetic construct
  source 1..36: mol_type = other DNA
atctacattagtagaaattaatagggattatttatc

SEQ ID NO: 2390 - DNA, 36 bp, synthetic construct; identical to SEQ ID NO: 1801
  source 1..36: mol_type = other DNA

SEQ ID NO: 2391 - DNA, 36 bp, synthetic construct; identical to SEQ ID NO: 1889
  source 1..36: mol_type = other DNA

SEQ ID NO: 2392 - DNA, 36 bp, synthetic construct
  source 1..36: mol_type = other DNA
atctacaatagtagaaattatcttttgtctctagac

SEQ ID NO: 2393 - DNA, 37 bp, synthetic construct
  source 1..37: mol_type = other DNA
agttataaggaacaaataaatgcctgctgttgcaggc

SEQ ID NO: 2394 - DNA, 36 bp, synthetic construct; identical to SEQ ID NO: 1777
  source 1..36: mol_type = other DNA

SEQ ID NO: 2395 - DNA, 36 bp, synthetic construct; identical to SEQ ID NO: 1777
  source 1..36: mol_type = other DNA

SEQ ID NO: 2396 - DNA, 36 bp, synthetic construct
  source 1..36: mol_type = other DNA
atctacaatagtagaaattaaatttgtggtctagac

SEQ ID NO: 2397 - DNA, 36 bp, synthetic construct; identical to SEQ ID NO: 1787
  source 1..36: mol_type = other DNA

SEQ ID NO: 2398 - DNA, 38 bp, synthetic construct
  source 1..38: mol_type = other DNA
atctacactagtagaaattctttaaggttattcaacca

SEQ ID NO: 2399 - DNA, 36 bp, synthetic construct
  source 1..36: mol_type = other DNA
gttgaatagccttaaagaatttctactagtgtagat

SEQ ID NO: 2400 - DNA, 29 bp, synthetic construct
  source 1..29: mol_type = other DNA
ttagtagacatttcgcttacagtctcaac

SEQ ID NO: 2401 - DNA, 36 bp, synthetic construct
  source 1..36: mol_type = other DNA
cctgcatcagcaggcatttattgcttccttataacc

SEQ ID NO: 2402 - DNA, 36 bp, synthetic construct; identical to SEQ ID NO: 1787
  source 1..36: mol_type = other DNA

SEQ ID NO: 2403 - DNA, 36 bp, synthetic construct; identical to SEQ ID NO: 1712
  source 1..36: mol_type = other DNA

SEQ ID NO: 2404 - DNA, 36 bp, synthetic construct; identical to SEQ ID NO: 1787
  source 1..36: mol_type = other DNA

SEQ ID NO: 2405 - DNA, 36 bp, synthetic construct
  source 1..36: mol_type = other DNA
atctaccttagtagacattccgcttacagtttcaac

SEQ ID NO: 2406 - DNA, 40 bp, synthetic construct
  source 1..40: mol_type = other DNA
gttgaataaccttaaagaatttctactagtgtagattttg

SEQ ID NO: 2407 - DNA, 36 bp, synthetic construct; identical to SEQ ID NO: 1712
  source 1..36: mol_type = other DNA

SEQ ID NO: 2408 - DNA, 36 bp, synthetic construct; identical to SEQ ID NO: 1787
  source 1..36: mol_type = other DNA

SEQ ID NO: 2409 - DNA, 36 bp, synthetic construct; identical to SEQ ID NO: 1787
  source 1..36: mol_type = other DNA

SEQ ID NO: 2410 - DNA, 36 bp, synthetic construct; identical to SEQ ID NO: 1777
  source 1..36: mol_type = other DNA

SEQ ID NO: 2411 - DNA, 37 bp, synthetic construct
  source 1..37: mol_type = other DNA
gcctgcaacagcaggcatttatttgttccttataact

SEQ ID NO: 2412 - DNA, 36 bp, synthetic construct; identical to SEQ ID NO: 1712
  source 1..36: mol_type = other DNA

SEQ ID NO: 2413 - DNA, 36 bp, synthetic construct
  source 1..36: mol_type = other DNA
gttataaggaacaaataaatgcctgctgttgcaggc

SEQ ID NO: 2414 - DNA, 36 bp, synthetic construct; identical to SEQ ID NO: 1777
  source 1..36: mol_type = other DNA

SEQ ID NO: 2415 - DNA, 36 bp, synthetic construct; identical to SEQ ID NO: 1777
  source 1..36: mol_type = other DNA

SEQ ID NO: 2416 - DNA, 36 bp, synthetic construct; identical to SEQ ID NO: 1787
  source 1..36: mol_type = other DNA

SEQ ID NO: 2417 - DNA, 36 bp, synthetic construct; identical to SEQ ID NO: 1787
  source 1..36: mol_type = other DNA

SEQ ID NO: 2418 - DNA, 36 bp, synthetic construct
  source 1..36: mol_type = other DNA
atctacactagtagaaattctttaaggctattcaac

SEQ ID NO: 2419 - DNA, 36 bp, synthetic construct; identical to SEQ ID NO: 1712
  source 1..36: mol_type = other DNA

SEQ ID NO: 2420 - DNA, 37 bp, synthetic construct
  source 1..37: mol_type = other DNA
aatctacactagtagaaattctttaaggttattcaac

SEQ ID NO: 2421 - DNA, 36 bp, synthetic construct; identical to SEQ ID NO: 1934
  source 1..36: mol_type = other DNA

SEQ ID NO: 2422 - DNA, 36 bp, synthetic construct
  source 1..36: mol_type = other DNA
ggctatacgtctttgaaaatttctactcttgtagat

SEQ ID NO: 2423 - DNA, 36 bp, synthetic construct
  source 1..36: mol_type = other DNA
gtctaaaaggctaattaaatttctactattgtagat

SEQ ID NO: 2424 - DNA, 36 bp, synthetic construct; identical to SEQ ID NO: 2423
  source 1..36: mol_type = other DNA

SEQ ID NO: 2425 - DNA, 36 bp, synthetic construct; identical to SEQ ID NO: 1934
  source 1..36: mol_type = other DNA

SEQ ID NO: 2426 - DNA, 36 bp, synthetic construct
  source 1..36: mol_type = other DNA
atctacacatcagtagaaattataagttattcaaac

SEQ ID NO: 2427 - DNA, 36 bp, synthetic construct
  source 1..36: mol_type = other DNA
atctacaacagtagaaattatttaaggttactcaac

SEQ ID NO: 2428 - DNA, 36 bp, synthetic construct
  source 1..36: mol_type = other DNA
atctacaacagtagaaattttcaaaggtctttaaac

SEQ ID NO: 2429 - DNA, 36 bp, synthetic construct
  source 1..36: mol_type = other DNA
atctacaatagtagaaatttttgtggctttatagcc

SEQ ID NO: 2430 - DNA, 36 bp, synthetic construct
  source 1..36: mol_type = other DNA
ggctaaacgcctgtttaaatttctactattgtagat

SEQ ID NO: 2431 - DNA, 37 bp, synthetic construct
  source 1..37: mol_type = other DNA
gttgaaactgtaagcgaaatgtctactaaggtagatt

SEQ ID NO: 2432 - DNA, 36 bp, synthetic construct; identical to SEQ ID NO: 2387
  source 1..36: mol_type = other DNA

SEQ ID NO: 2433 - DNA, 30 bp, synthetic construct
  source 1..30: mol_type = other DNA
gttgaaactgtaagcggaatgtctactaag

SEQ ID NO: 2434 - DNA, 36 bp, synthetic construct; identical to SEQ ID NO: 1739
  source 1..36: mol_type = other DNA

SEQ ID NO: 2435 - DNA, 27 bp, synthetic construct
  source 1..27: mol_type = other DNA
gttgaaactgtaagcgaaatgtctact

SEQ ID NO: 2436 - DNA, 36 bp, synthetic construct
  source 1..36: mol_type = other DNA
gttaagtaatatagaaaaatttctactattgtagat

SEQ ID NO: 2437 - DNA, 19 bp, synthetic construct
  source 1..19: mol_type = other DNA
aatgtctactagggtagat

SEQ ID NO: 2438 - DNA, 36 bp, synthetic construct
  source 1..36: mol_type = other DNA
gtctagacgaccgatttaatttctactattgtagat

SEQ ID NO: 2439 - DNA, 36 bp, synthetic construct
  source 1..36: mol_type = other DNA
atctacaatagtagaaattataatagtcttatagac

SEQ ID NO: 2440 - DNA, 36 bp, synthetic construct
  source 1..36: mol_type = other DNA
gttgaataacctttaagaatttctactattgtagat

SEQ ID NO: 2441 - DNA, 36 bp, synthetic construct; identical to SEQ ID NO: 2439
  source 1..36: mol_type = other DNA

SEQ ID NO: 2442 - DNA, 36 bp, synthetic construct
  source 1..36: mol_type = other DNA
atctacaatagtagaaattcttaaaggttattcaac

SEQ ID NO: 2443 - DNA, 36 bp, synthetic construct; identical to SEQ ID NO: 1634
  source 1..36: mol_type = other DNA

SEQ ID NO: 2444 - DNA, 36 bp, synthetic construct; identical to SEQ ID NO: 1634
  source 1..36: mol_type = other DNA

SEQ ID NO: 2445 - DNA, 23 bp, synthetic construct
  source 1..23: mol_type = other DNA
atctacaatagtagaaattttgt

SEQ ID NO: 2446 - DNA, 36 bp, synthetic construct
  source 1..36: mol_type = other DNA
cgtgtttagatatacagaatttctactattgtagat

SEQ ID NO: 2447 - DNA, 36 bp, synthetic construct
  source 1..36: mol_type = other DNA
ggctatacgcctacgaaaatttctactcttgtagat

SEQ ID NO: 2448 - DNA, 24 bp, synthetic construct
  source 1..24: mol_type = other DNA
gatttaatttctactattgtagat

SEQ ID NO: 2449 - DNA, 36 bp, synthetic construct
  source 1..36: mol_type = other DNA
gcttataaagcgcttgaaatttctactattgtagat

SEQ ID NO: 2450 - DNA, 36 bp, synthetic construct
  source 1..36: mol_type = other DNA
atctacaatagtagaaattttattggtgctttagac

SEQ ID NO: 2451 - DNA, 36 bp, synthetic construct; identical to SEQ ID NO: 1682
  source 1..36: mol_type = other DNA

SEQ ID NO: 2452 - DNA, 36 bp, synthetic construct
  source 1..36: mol_type = other DNA
gtttaaagacctttgaaaatttctactgttgtagat

SEQ ID NO: 2453 - DNA, 34 bp, synthetic construct
  source 1..34: mol_type = other DNA
cctgcaacagcaggcatttatttgttccttataa

SEQ ID NO: 2454 - DNA, 36 bp, synthetic construct
  source 1..36: mol_type = other DNA
atctacaatagtagaaattattcaaggtctttaaat

SEQ ID NO: 2455 - DNA, 37 bp, synthetic construct
  source 1..37: mol_type = other DNA
tgtttaatagacatatttaatttctactattgtagat

SEQ ID NO: 2456 - DNA, 29 bp, synthetic construct
  source 1..29: mol_type = other DNA
tcgtgcttgatctacaattagtagagatt

SEQ ID NO: 2457 - DNA, 36 bp, synthetic construct
  source 1..36: mol_type = other DNA
gtttaaaccacatataaaatttctactattgtagat

SEQ ID NO: 2458 - DNA, 36 bp, synthetic construct
  source 1..36: mol_type = other DNA
gttgtgtaaccttgaataatttctactattgtagat

SEQ ID NO: 2459 - DNA, 36 bp, synthetic construct
  source 1..36: mol_type = other DNA
atctacaaaagtagaaattatagtggtggtctagac

SEQ ID NO: 2460 - DNA, 36 bp, synthetic construct
  source 1..36: mol_type = other DNA
ccgccattcagtaacacaagcatcagcgagtggcgc

SEQ ID NO: 2461 - DNA, 36 bp, synthetic construct
  source 1..36: mol_type = other DNA
atctacaatagtagaaattagtgtggtctgttagac

SEQ ID NO: 2462 - DNA, 36 bp, synthetic construct
  source 1..36: mol_type = other DNA
gtttaacgtcagtattaaatttctacttttgtagat

SEQ ID NO: 2463 - DNA, 36 bp, synthetic construct
  source 1..36: mol_type = other DNA
atctacaatagtagaaatttaaaaggccttatagcc

SEQ ID NO: 2464 - DNA, 21 bp, synthetic construct
  source 1..21: mol_type = other DNA
ggtgttaatgaatacaaaatt

SEQ ID NO: 2465 - DNA, 36 bp, synthetic construct; identical to SEQ ID NO: 2449
  source 1..36: mol_type = other DNA

SEQ ID NO: 2466 - DNA, 36 bp, synthetic construct
  source 1..36: mol_type = other DNA
atctacaatagtagaaattttatatacctcttagag

SEQ ID NO: 2467 - DNA, 36 bp, synthetic construct; identical to SEQ ID NO: 1867
  source 1..36: mol_type = other DNA

SEQ ID NO: 2468 - DNA, 36 bp, synthetic construct
  source 1..36: mol_type = other DNA
gtctaacccaaattcaaaatttctactattgtagat

SEQ ID NO: 2469 - DNA, 36 bp, synthetic construct
  source 1..36: mol_type = other DNA
gtctatagaacccttttaatttctactattgtagat

SEQ ID NO: 2470 - DNA, 38 bp, synthetic construct
  source 1..38: mol_type = other DNA
gggtctagaccactactataatttctacttatgtagat

SEQ ID NO: 2471 - DNA, 26 bp, synthetic construct
  source 1..26: mol_type = other DNA
cgtagagacgcaaaatattgcgtctc

SEQ ID NO: 2472 - DNA, 36 bp, synthetic construct
  source 1..36: mol_type = other DNA
gtctaatgactaataacaatacctactattgtaggc

SEQ ID NO: 2473 - DNA, 36 bp, synthetic construct
  source 1..36: mol_type = other DNA
ctttattaccaataaaaaatttctacttttgtagat

SEQ ID NO: 2474 - DNA, 36 bp, synthetic construct
  source 1..36: mol_type = other DNA
gtctataagacttaagtaatttctactattgtagat

SEQ ID NO: 2475 - DNA, 36 bp, synthetic construct
  source 1..36: mol_type = other DNA
ccgccactgactgattcaaacttcaagctgcgagcg

SEQ ID NO: 2476 - DNA, 36 bp, synthetic construct; identical to SEQ ID NO: 1839
  source 1..36: mol_type = other DNA

SEQ ID NO: 2477 - DNA, 36 bp, synthetic construct
  source 1..36: mol_type = other DNA
atctacaatagtagaaattttgtatgcgctagcacc

SEQ ID NO: 2478 - DNA, 36 bp, synthetic construct; identical to SEQ ID NO: 1769
  source 1..36: mol_type = other DNA

SEQ ID NO: 2479 - DNA, 36 bp, synthetic construct
  source 1..36: mol_type = other DNA
atctacaatagtagaaattttgtgtggttttacacc

SEQ ID NO: 2480 - DNA, 36 bp, synthetic construct
  source 1..36: mol_type = other DNA
gtctatacggctctttaaatttctactattgtagat

SEQ ID NO: 2481 - DNA, 26 bp, synthetic construct
  source 1..26: mol_type = other DNA
atctacaacagtagaaattattaaag

SEQ ID NO: 2482 - DNA, 36 bp, synthetic construct
  source 1..36: mol_type = other DNA
gtctataaagaccaaaaaatttctactattgtagat

SEQ ID NO: 2483 - DNA, 26 bp, synthetic construct
  source 1..26: mol_type = other DNA
atctacaacagtagaaattattaaag

SEQ ID NO: 2484 - DNA, 36 bp, synthetic construct
  source 1..36: mol_type = other DNA
gttaagtaatataaaagaatttctactattgtagat

SEQ ID NO: 2485 - DNA, 36 bp, synthetic construct
  source 1..36: mol_type = other DNA
atctacgatagtagaaattaaatagtctttatagac

SEQ ID NO: 2486 - DNA, 36 bp, synthetic construct
  source 1..36: mol_type = other DNA
gtttaaactcgatattaaatttctactattgtagat

SEQ ID NO: 2487 - DNA, 36 bp, synthetic construct; identical to SEQ ID NO: 1702
  source 1..36: mol_type = other DNA

SEQ ID NO: 2488 - DNA, 36 bp, synthetic construct
  source 1..36: mol_type = other DNA
ggctagtaagctctaataatttctactattgtagat

SEQ ID NO: 2489 - DNA, 36 bp, synthetic construct
  source 1..36: mol_type = other DNA
gtctataaagaccttataatttctactattgtagat

SEQ ID NO: 2490 - DNA, 36 bp, synthetic construct
  source 1..36: mol_type = other DNA
ggctagtaagcttcaataatttctactattgtagat

SEQ ID NO: 2491 - DNA, 36 bp, synthetic construct
  source 1..36: mol_type = other DNA
ggctagtatgcctcaataatttctactattgtagat

SEQ ID NO: 2492 - DNA, 38 bp, synthetic construct
  source 1..38: mol_type = other DNA
atctacaatagtagaaatttattaagtcttctagacaa

SEQ ID NO: 2493 - DNA, 36 bp, synthetic construct
  source 1..36: mol_type = other DNA
ggcgcgcagcccagcgcgccaatgatcgactgacac

SEQ ID NO: 2494 - DNA, 36 bp, synthetic construct
  source 1..36: mol_type = other DNA
ctcaaatagacctataagatttctacttttgtagat

SEQ ID NO: 2495 - DNA, 36 bp, synthetic construct
  source 1..36: mol_type = other DNA
atctacaatagtagaaattagttggtctcaatagac

SEQ ID NO: 2496 - DNA, 36 bp, synthetic construct; identical to SEQ ID NO: 1801
  source 1..36: mol_type = other DNA

SEQ ID NO: 2497 - DNA, 36 bp, synthetic construct; identical to SEQ ID NO: 1702
  source 1..36: mol_type = other DNA

SEQ ID NO: 2498 - DNA, 36 bp, synthetic construct
  source 1..36: mol_type = other DNA
gtctatatgactcaacaaatttctactatcgtagat

SEQ ID NO: 2499 - DNA, 36 bp, synthetic construct
  source 1..36: mol_type = other DNA
gtttaagacctccttttaatttctactgttgtagat

SEQ ID NO: 2500 - DNA, 36 bp, synthetic construct
  source 1..36: mol_type = other DNA
atctacaatagtagaaattttcagggatctttggat

SEQ ID NO: 2501 - DNA, 36 bp, synthetic construct; identical to SEQ ID NO: 2488
  source 1..36: mol_type = other DNA

SEQ ID NO: 2502 - DNA, 36 bp, synthetic construct; identical to SEQ ID NO: 1762
  source 1..36: mol_type = other DNA

SEQ ID NO: 2503 - DNA, 36 bp, synthetic construct; identical to SEQ ID NO: 2488
  source 1..36: mol_type = other DNA

SEQ ID NO: 2504 - DNA, 36 bp, synthetic construct
  source 1..36: mol_type = other DNA
atctacaatagtagaaattatacagctgccttaaac

SEQ ID NO: 2505 - DNA, 36 bp, synthetic construct; identical to SEQ ID NO: 1786
  source 1..36: mol_type = other DNA

SEQ ID NO: 2506 - DNA, 36 bp, synthetic construct; identical to SEQ ID NO: 1786
  source 1..36: mol_type = other DNA

SEQ ID NO: 2507 - DNA, 36 bp, synthetic construct; identical to SEQ ID NO: 1786
  source 1..36: mol_type = other DNA

SEQ ID NO: 2508 - DNA, 36 bp, synthetic construct; identical to SEQ ID NO: 1786
  source 1..36: mol_type = other DNA

SEQ ID NO: 2509 - DNA, 36 bp, synthetic construct; identical to SEQ ID NO: 2488
  source 1..36: mol_type = other DNA

SEQ ID NO: 2510 - DNA, 36 bp, synthetic construct; identical to SEQ ID NO: 1786
  source 1..36: mol_type = other DNA

SEQ ID NO: 2511 - DNA, 36 bp, synthetic construct
  source 1..36: mol_type = other DNA
atctacaatagtagaaattaaacttggcttatagcc

SEQ ID NO: 2512 - DNA, 36 bp, synthetic construct; identical to SEQ ID NO: 1773
  source 1..36: mol_type = other DNA

SEQ ID NO: 2513 - DNA, 36 bp, synthetic construct; identical to SEQ ID NO: 1805
  source 1..36: mol_type = other DNA

SEQ ID NO: 2514 - DNA, 36 bp, synthetic construct
  source 1..36: mol_type = other DNA
atctacaatagtagaaattcaatataacttctaaac

SEQ ID NO: 2515 - DNA, 33 bp, synthetic construct
  source 1..33: mol_type = other DNA
tacaaaagtagaaatttgatatagggattagac

SEQ ID NO: 2516 - DNA, 39 bp, synthetic construct
  source 1..39: mol_type = other DNA
gctgtctaatccctatatcaaatttctacttttgtagat

SEQ ID NO: 2517 - DNA, 36 bp, synthetic construct
  source 1..36: mol_type = other DNA
atctacaacagtagaaatttaataaaatctttagac

SEQ ID NO: 2518 - DNA, 36 bp, synthetic construct
  source 1..36: mol_type = other DNA
gtctaaaggccttatataatttctacttttgtagat

SEQ ID NO: 2519 - DNA, 36 bp, synthetic construct
  source 1..36: mol_type = other DNA
atctacatagtagaaattatttaaggttattcaatc

SEQ ID NO: 2520 - DNA, 36 bp, synthetic construct
  source 1..36: mol_type = other DNA
atctacaacagtagaaattatttaaggttattcaac

SEQ ID NO: 2521 - DNA, 36 bp, synthetic construct; identical to SEQ ID NO: 2520
  source 1..36: mol_type = other DNA

SEQ ID NO: 2522 - DNA, 38 bp, synthetic construct
  source 1..38: mol_type = other DNA
atctacatagtagaaattatttaaggttattcaatcat

SEQ ID NO: 2523 - DNA, 36 bp, synthetic construct
  source 1..36: mol_type = other DNA
atctacaaaagtagaaatttcttattggaaatagag

SEQ ID NO: 2524 - DNA, 36 bp, synthetic construct; identical to SEQ ID NO: 1617
  source 1..36: mol_type = other DNA

SEQ ID NO: 2525 - DNA, 36 bp, synthetic construct; identical to SEQ ID NO: 2335
  source 1..36: mol_type = other DNA

SEQ ID NO: 2526 - DNA, 36 bp, synthetic construct
  source 1..36: mol_type = other DNA
atctacaatagtagaaattcaatctgtctaatagac

SEQ ID NO: 2527 - DNA, 24 bp, synthetic construct
  source 1..24: mol_type = other DNA
atctacaatagtagaaattatact

SEQ ID NO: 2528 - DNA, 23 bp, synthetic construct
  source 1..23: mol_type = other DNA
aaagaatttctactgttgtagat

SEQ ID NO: 2529 - DNA, 36 bp, synthetic construct; identical to SEQ ID NO: 1957
  source 1..36: mol_type = other DNA

SEQ ID NO: 2530 - DNA, 36 bp, synthetic construct; identical to SEQ ID NO: 2447
  source 1..36: mol_type = other DNA

SEQ ID NO: 2531 - DNA, 36 bp, synthetic construct; identical to SEQ ID NO: 1781
  source 1..36: mol_type = other DNA

SEQ ID NO: 2532 - DNA, 36 bp, synthetic construct
  source 1..36: mol_type = other DNA
gtttaatcaacccttagaatttctactattgtagat

SEQ ID NO: 2533 - DNA, 36 bp, synthetic construct
  source 1..36: mol_type = other DNA
gtctaaatgactcattaaatttctactattgtagat

SEQ ID NO: 2534 - DNA, 36 bp, synthetic construct
  source 1..36: mol_type = other DNA
gtctaaacgacttagttaatttctactattgtagat

SEQ ID NO: 2535 - DNA, 36 bp, synthetic construct; identical to SEQ ID NO: 2078
  source 1..36: mol_type = other DNA

SEQ ID NO: 2536 - DNA, 36 bp, synthetic construct; identical to SEQ ID NO: 2078
  source 1..36: mol_type = other DNA

SEQ ID NO: 2537 - DNA, 36 bp, synthetic construct; identical to SEQ ID NO: 2532
  source 1..36: mol_type = other DNA

SEQ ID NO: 2538 - DNA, 36 bp, synthetic construct; identical to SEQ ID NO: 2532
  source 1..36: mol_type = other DNA

SEQ ID NO: 2539 - DNA, 36 bp, synthetic construct; identical to SEQ ID NO: 2532
  source 1..36: mol_type = other DNA

SEQ ID NO: 2540 - DNA, 36 bp, synthetic construct
  source 1..36: mol_type = other DNA
gcctaatacctattggatatttctactctcgtagat

SEQ ID NO: 2541 - DNA, 36 bp, synthetic construct; identical to SEQ ID NO: 2532
  source 1..36: mol_type = other DNA

SEQ ID NO: 2542 - DNA, 36 bp, synthetic construct; identical to SEQ ID NO: 2078
  source 1..36: mol_type = other DNA

SEQ ID NO: 2543 - DNA, 36 bp, synthetic construct; identical to SEQ ID NO: 2532
  source 1..36: mol_type = other DNA

SEQ ID NO: 2544 - DNA, 34 bp, synthetic construct
  source 1..34: mol_type = other DNA
atctacaatagtagaaattctaagggttgattaa

SEQ ID NO: 2545 - DNA, 36 bp, synthetic construct
  source 1..36: mol_type = other DNA
atctacaagagtagaaattttcgtaggcgtatagcc

SEQ ID NO: 2546 - DNA, 36 bp, synthetic construct
  source 1..36: mol_type = other DNA
atctacaatagtagaaatttaattgtttttataaag

SEQ ID NO: 2547 - DNA, 36 bp, synthetic construct
  source 1..36: mol_type = other DNA
gtttaactaacccgcaaaatttctacttttgtagat

SEQ ID NO: 2548 - DNA, 36 bp, synthetic construct
  source 1..36: mol_type = other DNA
atctacaatagtagaaatttgtaatcacctttagac

SEQ ID NO: 2549 - DNA, 36 bp, synthetic construct
  source 1..36: mol_type = other DNA
atctacaatagtagaaattttttggtctttatagac

SEQ ID NO: 2550 - DNA, 36 bp, synthetic construct
  source 1..36: mol_type = other DNA
atctacaaaagtagaaatttaataggtctatttgag

SEQ ID NO: 2551 - DNA, 36 bp, synthetic construct
  source 1..36: mol_type = other DNA
gttcaataccattagtagatttctactttcgtagat

SEQ ID NO: 2552 - DNA, 23 bp, synthetic construct
  source 1..23: mol_type = other DNA
atctacaatagtagaaatttata

SEQ ID NO: 2553 - DNA, 36 bp, synthetic construct
  source 1..36: mol_type = other DNA
atctacaatagtagaaattgataggtacctttagat

SEQ ID NO: 2554 - DNA, 36 bp, synthetic construct; identical to SEQ ID NO: 2553
  source 1..36: mol_type = other DNA

SEQ ID NO: 2555 - DNA, 36 bp, synthetic construct
  source 1..36: mol_type = other DNA
gtctaaaggtattataaaatttctactattgtagat

SEQ ID NO: 2556 - DNA, 37 bp, synthetic construct
  source 1..37: mol_type = other DNA
gggctataagccgcaattaatttctactattgtagat

SEQ ID NO: 2557 - DNA, 36 bp, synthetic construct
  source 1..36: mol_type = other DNA
atctacaatagtagaaattattgaggagttatagcc

SEQ ID NO: 2558 - DNA, 38 bp, synthetic construct
  source 1..38: mol_type = other DNA
atctacaatagtagaaattaattgcggcttatagccca

SEQ ID NO: 2559 - DNA, 36 bp, synthetic construct
  source 1..36: mol_type = other DNA
atctacaatagtagaaatttaaaaggctttgtagcc

SEQ ID NO: 2560 - DNA, 37 bp, synthetic construct
  source 1..37: mol_type = other DNA
atctacaatagtagaaattaaatgaattcattagaca

SEQ ID NO: 2561 - DNA, 36 bp, synthetic construct
  source 1..36: mol_type = other DNA
atctacaatagtagaaattaaatgagtcttatagac

SEQ ID NO: 2562 - DNA, 36 bp, synthetic construct
  source 1..36: mol_type = other DNA
atctacaatagtagaaattaaaagggcattatagcc

SEQ ID NO: 2563 - DNA, 36 bp, synthetic construct; identical to SEQ ID NO: 1656
  source 1..36: mol_type = other DNA

SEQ ID NO: 2564 - DNA, 36 bp, synthetic construct
  source 1..36: mol_type = other DNA
gtcaaacactccgccacaatttctactgtcgtagat

SEQ ID NO: 2565 - DNA, 36 bp, synthetic construct
  source 1..36: mol_type = other DNA
gtctaatagtgttagtagatttctacttttgtagat

SEQ ID NO: 2566 - DNA, 29 bp, synthetic construct
  source 1..29: mol_type = other DNA
ggtgtaaggccatagaaaatttctacttg

SEQ ID NO: 2567 - DNA, 38 bp, synthetic construct
  source 1..38: mol_type = other DNA
acatctacaacagtagaaattgtatgtaaggtttagac

SEQ ID NO: 2568 - DNA, 36 bp, synthetic construct
  source 1..36: mol_type = other DNA
gtctaatagatatattcaatttctacttttgtagat

SEQ ID NO: 2569 - DNA, 36 bp, synthetic construct
  source 1..36: mol_type = other DNA
atctacacaagtagaaattttcaatggccttacacc

SEQ ID NO: 2570 - DNA, 36 bp, synthetic construct
  source 1..36: mol_type = other DNA
gtctataaaaggttttaaatttctactattgtagat

SEQ ID NO: 2571 - DNA, 36 bp, synthetic construct
  source 1..36: mol_type = other DNA
atctacaacagtagacatttgttttgatttatagac

SEQ ID NO: 2572 - DNA, 36 bp, synthetic construct
  source 1..36: mol_type = other DNA
atctacaaaagtagaaattgattatatgtttttaac

SEQ ID NO: 2573 - DNA, 36 bp, synthetic construct
  source 1..36: mol_type = other DNA
gtctaaaacaattgtttaatttctactattgtagat

SEQ ID NO: 2574 - DNA, 36 bp, synthetic construct
  source 1..36: mol_type = other DNA
atctacaatagtagaaattaattgagtggattagac

SEQ ID NO: 2575 - DNA, 37 bp, synthetic construct
  source 1..37: mol_type = other DNA
gtgagaccctgtgaaacctctcaggcgttgatcggac

SEQ ID NO: 2576 - DNA, 37 bp, synthetic construct
  source 1..37: mol_type = other DNA
gtgtcggataaccgcctttgcgtttggtcgccctacg

SEQ ID NO: 2577 - DNA, 36 bp, synthetic construct
  source 1..36: mol_type = other DNA
gtctataagagacaatgaatttctactattgtagat

SEQ ID NO: 2578 - DNA, 36 bp, synthetic construct
  source 1..36: mol_type = other DNA
ggtgtaaaaccatatgaaatttctactaatgtagat

SEQ ID NO: 2579 - DNA, 36 bp, synthetic construct
  source 1..36: mol_type = other DNA
atctacaaaagtagaaatctcctataaggtatagac

SEQ ID NO: 2580 - DNA, 36 bp, synthetic construct
  source 1..36: mol_type = other DNA
cccgaggcggccattcgggctcagagcagctgacac

SEQ ID NO: 2581 - DNA, 36 bp, synthetic construct
  source 1..36: mol_type = other DNA
gtctataccttataggagatttctacttttgtagat

SEQ ID NO: 2582 - DNA, 36 bp, synthetic construct
  source 1..36: mol_type = other DNA
gtttagaagcatgctttaatttctactgttgtagat

SEQ ID NO: 2583 - DNA, 36 bp, synthetic construct; identical to SEQ ID NO: 1630
  source 1..36: mol_type = other DNA

SEQ ID NO: 2584 - DNA, 36 bp, synthetic construct; identical to SEQ ID NO: 1776
  source 1..36: mol_type = other DNA

SEQ ID NO: 2585 - DNA, 37 bp, synthetic construct
  source 1..37: mol_type = other DNA
aatctacaatagtagaaattcaatgaggcttatagcc

SEQ ID NO: 2586 - DNA, 36 bp, synthetic construct
  source 1..36: mol_type = other DNA
gtctaatacagatattaaatttctacttttgtagat

SEQ ID NO: 2587 - DNA, 36 bp, synthetic construct
  source 1..36: mol_type = other DNA
gtttgataaacctataaaatttctactgttgtagat

SEQ ID NO: 2588 - DNA, 36 bp, synthetic construct
  source 1..36: mol_type = other DNA
atctacgatagtagaaattgtttattacttttagcc

SEQ ID NO: 2589 - DNA, 36 bp, synthetic construct
  source 1..36: mol_type = other DNA
atctaatacatatataagatttctacttttgtagat

SEQ ID NO: 2590 - DNA, 38 bp, synthetic construct
  source 1..38: mol_type = other DNA
acatctacaacagtagaaattcaatattggttctagac

SEQ ID NO: 2591 - DNA, 36 bp, synthetic construct
  source 1..36: mol_type = other DNA
atctacaaaagtagaaattttatggtgattttaaac

SEQ ID NO: 2592 - DNA, 36 bp, synthetic construct
  source 1..36: mol_type = other DNA
atctacaaaagtagaaattgaatatgcctattagag

SEQ ID NO: 2593 - DNA, 36 bp, synthetic construct
  source 1..36: mol_type = other DNA
atctacaaaagtagaaatgtactatctatatttgag

SEQ ID NO: 2594 - DNA, 36 bp, synthetic construct; identical to SEQ ID NO: 1659
  source 1..36: mol_type = other DNA

SEQ ID NO: 2595 - DNA, 36 bp, synthetic construct; identical to SEQ ID NO: 1659
  source 1..36: mol_type = other DNA

SEQ ID NO: 2596 - DNA, 37 bp, synthetic construct
  source 1..37: mol_type = other DNA
ggttaagtaacctatagtaatttctactgttgtagat

SEQ ID NO: 2597 - DNA, 36 bp, synthetic construct
  source 1..36: mol_type = other DNA
atctacaacagtagaaattactataggttacttaac

SEQ ID NO: 2598 - DNA, 36 bp, synthetic construct; identical to SEQ ID NO: 1659
  source 1..36: mol_type = other DNA

SEQ ID NO: 2599 - DNA, 36 bp, synthetic construct; identical to SEQ ID NO: 1659
  source 1..36: mol_type = other DNA

SEQ ID NO: 2600 - DNA, 36 bp, synthetic construct
  source 1..36: mol_type = other DNA
atctacaatagtagaaattttaaaagtcctttagac

SEQ ID NO: 2601 - DNA, 36 bp, synthetic construct; identical to SEQ ID NO: 2597
  source 1..36: mol_type = other DNA

SEQ ID NO: 2602 - DNA, 36 bp, synthetic construct
  source 1..36: mol_type = other DNA
gtctagaaaagacattaaatttctactattgtagat

SEQ ID NO: 2603 - DNA, 36 bp, synthetic construct
  source 1..36: mol_type = other DNA
atctacaatagtagaaattatataagcctattagac

SEQ ID NO: 2604 - DNA, 36 bp, synthetic construct
  source 1..36: mol_type = other DNA
gtctagaaccttctaaaaatttctactattgtagat

SEQ ID NO: 2605 - DNA, 36 bp, synthetic construct
  source 1..36: mol_type = other DNA
atctacaacagtagaaatttggttggtcgtttagac

SEQ ID NO: 2606 - DNA, 36 bp, synthetic construct
  source 1..36: mol_type = other DNA
gtctgacagtatatgttaatttctactttcgtagat

SEQ ID NO: 2607 - DNA, 36 bp, synthetic construct; identical to SEQ ID NO: 1738
  source 1..36: mol_type = other DNA

SEQ ID NO: 2608 - DNA, 36 bp, synthetic construct
  source 1..36: mol_type = other DNA
gtctaatagaccgtatgaatttctactatcgtagat

SEQ ID NO: 2609 - DNA, 34 bp, synthetic construct
  source 1..34: mol_type = other DNA
ctctaaaacacctattcaatttctacttttgtag

SEQ ID NO: 2610 - DNA, 36 bp, synthetic construct
  source 1..36: mol_type = other DNA
gtctgacagtatatgttaatttctactctcgtagat

SEQ ID NO: 2611 - DNA, 36 bp, synthetic construct
  source 1..36: mol_type = other DNA
atctacaaaagtagaaattggatatatctattagac

SEQ ID NO: 2612 - DNA, 39 bp, synthetic construct
  source 1..39: mol_type = other DNA
gtctatattgacttcataatttctactattgtagattaa

SEQ ID NO: 2613 - DNA, 36 bp, synthetic construct
  source 1..36: mol_type = other DNA
ctctataccgtataagagatttctacttttgtagat

SEQ ID NO: 2614 - DNA, 36 bp, synthetic construct
  source 1..36: mol_type = other DNA
atctacaacagtagaaattatttctaattattaaac

SEQ ID NO: 2615 - DNA, 36 bp, synthetic construct
  source 1..36: mol_type = other DNA
gtttaataattagaaataatttctactgttgtagat

SEQ ID NO: 2616 - DNA, 36 bp, synthetic construct; identical to SEQ ID NO: 2615
  source 1..36: mol_type = other DNA

SEQ ID NO: 2617 - DNA, 36 bp, synthetic construct
  source 1..36: mol_type = other DNA
ctctaataggcatattcaatttctacttttgtagat

SEQ ID NO: 2618 - DNA, 36 bp, synthetic construct
  source 1..36: mol_type = other DNA
atctacaatagtagaaattatctaaggcttatagcc

SEQ ID NO: 2619 - DNA, 36 bp, synthetic construct
  source 1..36: mol_type = other DNA
atctacaaaagtagaaatcggatattggttttagag

SEQ ID NO: 2620 - DNA, 36 bp, synthetic construct; identical to SEQ ID NO: 2617
  source 1..36: mol_type = other DNA

SEQ ID NO: 2621 - DNA, 36 bp, synthetic construct
  source 1..36: mol_type = other DNA
atctacaacagtagaaattatttctaatcgttaaac

SEQ ID NO: 2622 - DNA, 36 bp, synthetic construct
  source 1..36: mol_type = other DNA
atctacaatagtagaaatttttaaagccatattgac

SEQ ID NO: 2623 - DNA, 35 bp, synthetic construct
  source 1..35: mol_type = other DNA
atctacgagagtagaaattaacatatactgtcaga

SEQ ID NO: 2624 - DNA, 36 bp, synthetic construct
  source 1..36: mol_type = other DNA
atctacaatagtagaaattttataatacctttagac

SEQ ID NO: 2625 - DNA, 35 bp, synthetic construct
  source 1..35: mol_type = other DNA
tctgacagtatatgttaatttctactctcgtagat

SEQ ID NO: 2626 - DNA, 36 bp, synthetic construct
  source 1..36: mol_type = other DNA
atctacaagagtagaaattacatataactattaaac

SEQ ID NO: 2627 - DNA, 36 bp, synthetic construct; identical to SEQ ID NO: 2624
  source 1..36: mol_type = other DNA

SEQ ID NO: 2628 - DNA, 36 bp, synthetic construct; identical to SEQ ID NO: 2606
  source 1..36: mol_type = other DNA

SEQ ID NO: 2629 - DNA, 36 bp, synthetic construct; identical to SEQ ID NO: 2610
  source 1..36: mol_type = other DNA

SEQ ID NO: 2630 - DNA, 36 bp, synthetic construct
  source 1..36: mol_type = other DNA
ctcaaatattgatattacatttctacttttgtagat

SEQ ID NO: 2631 - DNA, 36 bp, synthetic construct
  source 1..36: mol_type = other DNA
ctttggaagaatataatttctactgaaagtgtagat

SEQ ID NO: 2632 - DNA, 36 bp, synthetic construct; identical to SEQ ID NO: 2631
  source 1..36: mol_type = other DNA

SEQ ID NO: 2633 - DNA, 36 bp, synthetic construct
  source 1..36: mol_type = other DNA
atctacaacagtagaaattttttatccggttttgac

SEQ ID NO: 2634 - DNA, 36 bp, synthetic construct
  source 1..36: mol_type = other DNA
atctacaacagtagaaatttataaggcctgttagat

SEQ ID NO: 2635 - DNA, 36 bp, synthetic construct
  source 1..36: mol_type = other DNA
atctaacaggccttataaatttctactgttgtagat

SEQ ID NO: 2636 - DNA, 36 bp, synthetic construct
  source 1..36: mol_type = other DNA
atctacaaaagtagaaatctaatataggaatttggc

SEQ ID NO: 2637 - DNA, 36 bp, synthetic construct; identical to SEQ ID NO: 1738
  source 1..36: mol_type = other DNA

SEQ ID NO: 2638 - DNA, 36 bp, synthetic construct
  source 1..36: mol_type = other DNA
gttcccgagttcattgaaatttctactgtcgtagat

SEQ ID NO: 2639 - DNA, 23 bp, synthetic construct
  source 1..23: mol_type = other DNA
gaaattcttaggttcttataaag

SEQ ID NO: 2640 - DNA, 36 bp, synthetic construct
  source 1..36: mol_type = other DNA
atctacactttcagtagaaattatattcttccaaag

SEQ ID NO: 2641 - DNA, 36 bp, synthetic construct
  source 1..36: mol_type = other DNA
ctctaaagcaccatataaatttctactgttgtagat

SEQ ID NO: 2642 - DNA, 39 bp, synthetic construct
  source 1..39: mol_type = other DNA
gtctaaacctcaatgaaaatttctactgttgtagataca

SEQ ID NO: 2643 - DNA, 39 bp, synthetic construct
  source 1..39: mol_type = other DNA
gtttcagccttgtataaaatttctactgttgtagatctg

SEQ ID NO: 2644 - DNA, 36 bp, synthetic construct
  source 1..36: mol_type = other DNA
ctttactactgatagtcaatttctacttttgtagat

SEQ ID NO: 2645 - DNA, 36 bp, synthetic construct
  source 1..36: mol_type = other DNA
atctacaatagtagaaattaaataggggtattaaac

SEQ ID NO: 2646 - DNA, 36 bp, synthetic construct; identical to SEQ ID NO: 2569
  source 1..36: mol_type = other DNA

SEQ ID NO: 2647 - DNA, 36 bp, synthetic construct; identical to SEQ ID NO: 1709
  source 1..36: mol_type = other DNA

SEQ ID NO: 2648 - DNA, 36 bp, synthetic construct
  source 1..36: mol_type = other DNA
gtctgaaagacaaaattaatttctactattgtagat

SEQ ID NO: 2649 - DNA, 36 bp, synthetic construct
  source 1..36: mol_type = other DNA
atctacaaaagtagaaattgaatataggtatttgag

SEQ ID NO: 2650 - DNA, 36 bp, synthetic construct
  source 1..36: mol_type = other DNA
ggctataagccttagataatttctactattgtagat

SEQ ID NO: 2651 - DNA, 36 bp, synthetic construct; identical to SEQ ID NO: 2650
  source 1..36: mol_type = other DNA

SEQ ID NO: 2652 - DNA, 36 bp, synthetic construct
  source 1..36: mol_type = other DNA
atctacaatagtagaaattcaattggccctctagcc

SEQ ID NO: 2653 - DNA, 36 bp, synthetic construct
  source 1..36: mol_type = other DNA
atctacaatagtagaaattattattgtctgctagac

SEQ ID NO: 2654 - DNA, 36 bp, synthetic construct
  source 1..36: mol_type = other DNA
gtttcagagttataaagaatttctactgttgtagat

SEQ ID NO: 2655 - DNA, 35 bp, synthetic construct
  source 1..35: mol_type = other DNA
gtcaaaactcatttgaatctctactgtttgtagat

SEQ ID NO: 2656 - DNA, 36 bp, synthetic construct
  source 1..36: mol_type = other DNA
atctacaatagtagaaattatttgacttgtatagtc

SEQ ID NO: 2657 - DNA, 36 bp, synthetic construct
  source 1..36: mol_type = other DNA
atctacaatagtagaaattaaataagagtactaacc

SEQ ID NO: 2658 - DNA, 36 bp, synthetic construct
  source 1..36: mol_type = other DNA
atctacaacagtagaaattcttattcagtttgaaac

SEQ ID NO: 2659 - DNA, 36 bp, synthetic construct
  source 1..36: mol_type = other DNA
gtctagcgagcctaaaaaatttctactattgtagat

SEQ ID NO: 2660 - DNA, 36 bp, synthetic construct
  source 1..36: mol_type = other DNA
gttaagtaacttaaataatttctactgtgtgtagat

SEQ ID NO: 2661 - DNA, 36 bp, synthetic construct
  source 1..36: mol_type = other DNA
atctacgatagtagaaattatctagtccttatagac

SEQ ID NO: 2662 - DNA, 36 bp, synthetic construct
  source 1..36: mol_type = other DNA
gtctaattgactctattaatttctactgttgtagat

SEQ ID NO: 2663 - DNA, 36 bp, synthetic construct; identical to SEQ ID NO: 1845
  source 1..36: mol_type = other DNA

SEQ ID NO: 2664 - DNA, 36 bp, synthetic construct; identical to SEQ ID NO: 1762
  source 1..36: mol_type = other DNA

SEQ ID NO: 2665 - DNA, 36 bp, synthetic construct; identical to SEQ ID NO: 1762
  source 1..36: mol_type = other DNA

SEQ ID NO: 2666 - DNA, 36 bp, synthetic construct; identical to SEQ ID NO: 1905
  source 1..36: mol_type = other DNA

SEQ ID NO: 2667 - DNA, 36 bp, synthetic construct; identical to SEQ ID NO: 1762
  source 1..36: mol_type = other DNA

SEQ ID NO: 2668 - DNA, 36 bp, synthetic construct; identical to SEQ ID NO: 1762
  source 1..36: mol_type = other DNA

SEQ ID NO: 2669 - DNA, 36 bp, synthetic construct; identical to SEQ ID NO: 1905
  source 1..36: mol_type = other DNA

SEQ ID NO: 2670 - DNA, 36 bp, synthetic construct; identical to SEQ ID NO: 1905
  source 1..36: mol_type = other DNA

SEQ ID NO: 2671 - DNA, 36 bp, synthetic construct; identical to SEQ ID NO: 1905
  source 1..36: mol_type = other DNA

SEQ ID NO: 2672 - DNA, 36 bp, synthetic construct; identical to SEQ ID NO: 1762
  source 1..36: mol_type = other DNA

SEQ ID NO: 2673 - DNA, 36 bp, synthetic construct; identical to SEQ ID NO: 1905
  source 1..36: mol_type = other DNA

SEQ ID NO: 2674 - DNA, 36 bp, synthetic construct; identical to SEQ ID NO: 2298
  source 1..36: mol_type = other DNA

SEQ ID NO: 2675 - DNA, 36 bp, synthetic construct
  source 1..36: mol_type = other DNA
gtttaagacaaatacaaaatttctactgttgtagat

SEQ ID NO: 2676 - DNA, 36 bp, synthetic construct
  source 1..36: mol_type = other DNA
atctaccgaagtagaaattgttagttactatttgac

SEQ ID NO: 2677 - DNA, 37 bp, synthetic construct
  source 1..37: mol_type = other DNA
tatctaccgaagtagaaattgttagttactatttgac

SEQ ID NO: 2678 - DNA, 36 bp, synthetic construct
  source 1..36: mol_type = other DNA
gtccaaaggacggattgaatttctactattgtagat

SEQ ID NO: 2679 - DNA, 36 bp, synthetic construct
  source 1..36: mol_type = other DNA
atctacaacagtagaaattattattaattattaaac

SEQ ID NO: 2680 - DNA, 37 bp, synthetic construct
  source 1..37: mol_type = other DNA
ggctataaggccatattaatttctactattcgtagat

SEQ ID NO: 2681 - DNA, 36 bp, synthetic construct; identical to SEQ ID NO: 1814
  source 1..36: mol_type = other DNA

SEQ ID NO: 2682 - DNA, 36 bp, synthetic construct; identical to SEQ ID NO: 2676
  source 1..36: mol_type = other DNA

SEQ ID NO: 2683 - DNA, 37 bp, synthetic construct; identical to SEQ ID NO: 2680
  source 1..37: mol_type = other DNA

SEQ ID NO: 2684 - DNA, 36 bp, synthetic construct
  source 1..36: mol_type = other DNA
atctacacaagtagaaattatgttgggcttatagcc

SEQ ID NO: 2685 - DNA, 36 bp, synthetic construct
  source 1..36: mol_type = other DNA
gttaagtaacctaaataatttctactgtgtgtagat

SEQ ID NO: 2686 - DNA, 36 bp, synthetic construct
  source 1..36: mol_type = other DNA
atctacacacagtagaaattatttaagttacttaac

SEQ ID NO: 2687 - DNA, 36 bp, synthetic construct
  source 1..36: mol_type = other DNA
gttaaatagctttattaaatttctacttttgtagat

SEQ ID NO: 2688 - DNA, 36 bp, synthetic construct
  source 1..36: mol_type = other DNA
gtctaaaaaggcattcaaatttctactattgtagat

SEQ ID NO: 2689 - DNA, 36 bp, synthetic construct
  source 1..36: mol_type = other DNA
ggctatcagcctcacataatttctactctcgtagat

SEQ ID NO: 2690 - DNA, 36 bp, synthetic construct; identical to SEQ ID NO: 2689
  source 1..36: mol_type = other DNA

SEQ ID NO: 2691 - DNA, 36 bp, synthetic construct
  source 1..36: mol_type = other DNA
gtctgtaagacctcagtaatttctactatcgtagat

SEQ ID NO: 2692 - DNA, 36 bp, synthetic construct
  source 1..36: mol_type = other DNA
gtctaatacctctataaaatttctacttttgtagat

SEQ ID NO: 2693 - DNA, 36 bp, synthetic construct
  source 1..36: mol_type = other DNA
gtttaatcaatatattcaatttctacttttgtagat

SEQ ID NO: 2694 - DNA, 36 bp, synthetic construct
  source 1..36: mol_type = other DNA
atctacaatagtagaaattttgattaactattagac

SEQ ID NO: 2695 - DNA, 36 bp, synthetic construct
  source 1..36: mol_type = other DNA
gtttccccacgtggtttaatttctacttttgtagat

SEQ ID NO: 2696 - DNA, 36 bp, synthetic construct
  source 1..36: mol_type = other DNA
gtctagaagcatgctttaatttctactattgtagat

SEQ ID NO: 2697 - DNA, 36 bp, synthetic construct
  source 1..36: mol_type = other DNA
atctacaatagtagaaattttatacggtctaacacc

SEQ ID NO: 2698 - DNA, 36 bp, synthetic construct
  source 1..36: mol_type = other DNA
gttgagtaaccataagaaaatttctactgtgtagat

SEQ ID NO: 2699 - DNA, 36 bp, synthetic construct
  source 1..36: mol_type = other DNA
atctacaatagtagaaatttaaaatgtctcttagac

SEQ ID NO: 2700 - DNA, 36 bp, synthetic construct; identical to SEQ ID NO: 1818
  source 1..36: mol_type = other DNA

SEQ ID NO: 2701 - DNA, 35 bp, synthetic construct
  source 1..35: mol_type = other DNA
ctcaatatcttcattagatttctacttttgtagat

SEQ ID NO: 2702 - DNA, 36 bp, synthetic construct
  source 1..36: mol_type = other DNA
atctacaatagtagaaattattagaatcttctaaac

SEQ ID NO: 2703 - DNA, 36 bp, synthetic construct; identical to SEQ ID NO: 1700
  source 1..36: mol_type = other DNA

SEQ ID NO: 2704 - DNA, 36 bp, synthetic construct
  source 1..36: mol_type = other DNA
atctacaaaagtagaaattgaatatattgattaaac

SEQ ID NO: 2705 - DNA, 36 bp, synthetic construct
  source 1..36: mol_type = other DNA
gtttaatcgatatattcaatttctacttttgtagat

SEQ ID NO: 2706 - DNA, 36 bp, synthetic construct; identical to SEQ ID NO: 2611
  source 1..36: mol_type = other DNA

SEQ ID NO: 2707 - DNA, 36 bp, synthetic construct
  source 1..36: mol_type = other DNA
atctacaaaagtagaaattggatatatctattaaac

SEQ ID NO: 2708 - DNA, 36 bp, synthetic construct; identical to SEQ ID NO: 1718
  source 1..36: mol_type = other DNA

SEQ ID NO: 2709 - DNA, 36 bp, synthetic construct
  source 1..36: mol_type = other DNA
gtctataaggactagataatttctactattgtagat

SEQ ID NO: 2710 - DNA, 36 bp, synthetic construct
  source 1..36: mol_type = other DNA
atctacaatagtagaaattttgtatgctttcacacc

SEQ ID NO: 2711 - DNA, 36 bp, synthetic construct
  source 1..36: mol_type = other DNA
atctacaacagtagaaattctatatcagtttgaaac

SEQ ID NO: 2712 - DNA, 36 bp, synthetic construct; identical to SEQ ID NO: 2704
  source 1..36: mol_type = other DNA

SEQ ID NO: 2713 - DNA, 36 bp, synthetic construct; identical to SEQ ID NO: 2704
  source 1..36: mol_type = other DNA

SEQ ID NO: 2714 - DNA, 36 bp, synthetic construct; identical to SEQ ID NO: 2704
  source 1..36: mol_type = other DNA

SEQ ID NO: 2715 - DNA, 37 bp, synthetic construct
  source 1..37: mol_type = other DNA
aatctacaaaagtagaaattgaatatattgattaaac

SEQ ID NO: 2716 - DNA, 36 bp, synthetic construct; identical to SEQ ID NO: 2617
  source 1..36: mol_type = other DNA

SEQ ID NO: 2717 - DNA, 36 bp, synthetic construct; identical to SEQ ID NO: 2704
  source 1..36: mol_type = other DNA

SEQ ID NO: 2718 - DNA, 25 bp, synthetic construct
  source 1..25: mol_type = other DNA
gaaattgaatatattgattaaacac

SEQ ID NO: 2719 - DNA, 36 bp, synthetic construct; identical to SEQ ID NO: 1818
  source 1..36: mol_type = other DNA

SEQ ID NO: 2720 - DNA, 36 bp, synthetic construct
  source 1..36: mol_type = other DNA
ggctatatgctaatataatttctacttcttgtagat

SEQ ID NO: 2721 - DNA, 36 bp, synthetic construct
  source 1..36: mol_type = other DNA
cccgataaacgggataaaatttctactgttgtagat

SEQ ID NO: 2722 - DNA, 36 bp, synthetic construct
  source 1..36: mol_type = other DNA
gagcgcccccccgtcccggcattgatcgactgacac

SEQ ID NO: 2723 - DNA, 36 bp, synthetic construct
  source 1..36: mol_type = other DNA
atctacaatagtagaaatttaacaggtgctttagac

SEQ ID NO: 2724 - DNA, 36 bp, synthetic construct; identical to SEQ ID NO: 1637
  source 1..36: mol_type = other DNA

SEQ ID NO: 2725 - DNA, 36 bp, synthetic construct
  source 1..36: mol_type = other DNA
ctcaaatacagatagtacatttctacttttgtagat

SEQ ID NO: 2726 - DNA, 36 bp, synthetic construct; identical to SEQ ID NO: 2725
  source 1..36: mol_type = other DNA

SEQ ID NO: 2727 - DNA, 36 bp, synthetic construct; identical to SEQ ID NO: 1637
  source 1..36: mol_type = other DNA

SEQ ID NO: 2728 - DNA, 36 bp, synthetic construct; identical to SEQ ID NO: 1637
  source 1..36: mol_type = other DNA

SEQ ID NO: 2729 - DNA, 36 bp, synthetic construct; identical to SEQ ID NO: 2725
  source 1..36: mol_type = other DNA

SEQ ID NO: 2730 - DNA, 36 bp, synthetic construct; identical to SEQ ID NO: 2725
  source 1..36: mol_type = other DNA

SEQ ID NO: 2731 - DNA, 36 bp, synthetic construct; identical to SEQ ID NO: 1637
  source 1..36: mol_type = other DNA

SEQ ID NO: 2732 - DNA, 36 bp, synthetic construct; identical to SEQ ID NO: 1637
  source 1..36: mol_type = other DNA

SEQ ID NO: 2733 - DNA, 36 bp, synthetic construct; identical to SEQ ID NO: 1637
  source 1..36: mol_type = other DNA

SEQ ID NO: 2734 - DNA, 36 bp, synthetic construct; identical to SEQ ID NO: 2725
  source 1..36: mol_type = other DNA

SEQ ID NO: 2735 - DNA, 36 bp, synthetic construct
  source 1..36: mol_type = other DNA
ccgccacaagctcttcaaatccaaaggccctgcggt

SEQ ID NO: 2736 - DNA, 36 bp, synthetic construct; identical to SEQ ID NO: 1873
  source 1..36: mol_type = other DNA

SEQ ID NO: 2737 - DNA, 38 bp, synthetic construct
  source 1..38: mol_type = other DNA
aaggtgtgaaagcatgcaaaatttctactattgtagat

SEQ ID NO: 2738 - DNA, 36 bp, synthetic construct
  source 1..36: mol_type = other DNA
cccgaatacacctataagatttctactgttgtagat

SEQ ID NO: 2739 - DNA, 36 bp, synthetic construct; identical to SEQ ID NO: 2699
  source 1..36: mol_type = other DNA

SEQ ID NO: 2740 - DNA, 36 bp, synthetic construct
  source 1..36: mol_type = other DNA
gtctaaacgactttttaaatttctactattgtagat

SEQ ID NO: 2741 - DNA, 36 bp, synthetic construct
  source 1..36: mol_type = other DNA
ccgcctcaagctcgctggaatcgcgacgactgcggc

SEQ ID NO: 2742 - DNA, 36 bp, synthetic construct
  source 1..36: mol_type = other DNA
atctacaaaagtagaaatttaatataggtattcgag

SEQ ID NO: 2743 - DNA, 36 bp, synthetic construct; identical to SEQ ID NO: 2742
  source 1..36: mol_type = other DNA

SEQ ID NO: 2744 - DNA, 37 bp, synthetic construct
  source 1..37: mol_type = other DNA
atctacaaaagtagaaattgaatatattgatttaact

SEQ ID NO: 2745 - DNA, 36 bp, synthetic construct
  source 1..36: mol_type = other DNA
ccgcctcaaactggtcaactttgcagagtggtcaac

SEQ ID NO: 2746 - DNA, 36 bp, synthetic construct; identical to SEQ ID NO: 2692
  source 1..36: mol_type = other DNA

SEQ ID NO: 2747 - DNA, 36 bp, synthetic construct
  source 1..36: mol_type = other DNA
gtttaatgctcattaaaaatttctactctcgtagat

SEQ ID NO: 2748 - DNA, 36 bp, synthetic construct
  source 1..36: mol_type = other DNA
gtctatacgaccaaaacaatttctactattgtagat

SEQ ID NO: 2749 - DNA, 36 bp, synthetic construct; identical to SEQ ID NO: 1873
  source 1..36: mol_type = other DNA

SEQ ID NO: 2750 - DNA, 27 bp, synthetic construct
  source 1..27: mol_type = other DNA
atctacaatagtagaaattaaaggtaa

SEQ ID NO: 2751 - DNA, 36 bp, synthetic construct
  source 1..36: mol_type = other DNA
ctcaaatccatatatagaatttctacttttgtagat

SEQ ID NO: 2752 - DNA, 36 bp, synthetic construct
  source 1..36: mol_type = other DNA
gtctagaaggcattcttaatttctactgttgtagat

SEQ ID NO: 2753 - DNA, 36 bp, synthetic construct; identical to SEQ ID NO: 1843
  source 1..36: mol_type = other DNA

SEQ ID NO: 2754 - DNA, 36 bp, synthetic construct; identical to SEQ ID NO: 1873
  source 1..36: mol_type = other DNA

SEQ ID NO: 2755 - DNA, 36 bp, synthetic construct
  source 1..36: mol_type = other DNA
atctacaaaagtagaaattctatatgtggatttaag

SEQ ID NO: 2756 - DNA, 36 bp, synthetic construct
  source 1..36: mol_type = other DNA
ggtgtaaaagcctttataatttctactattgtagat

SEQ ID NO: 2757 - DNA, 36 bp, synthetic construct
  source 1..36: mol_type = other DNA
atctacaatagtagaaattatctaagccctatagac

SEQ ID NO: 2758 - DNA, 36 bp, synthetic construct
  source 1..36: mol_type = other DNA
ctctaatccatatattagatttctacttttgtagat

SEQ ID NO: 2759 - DNA, 36 bp, synthetic construct
  source 1..36: mol_type = other DNA
gtctagcggacagataaaatttctactattgtagat

SEQ ID NO: 2760 - DNA, 36 bp, synthetic construct; identical to SEQ ID NO: 2332
  source 1..36: mol_type = other DNA

SEQ ID NO: 2761 - DNA, 36 bp, synthetic construct
  source 1..36: mol_type = other DNA
ccgcctcaagattgccgcagtcgcggcgactgcggc

SEQ ID NO: 2762 - DNA, 36 bp, synthetic construct; identical to SEQ ID NO: 2761
  source 1..36: mol_type = other DNA

SEQ ID NO: 2763 - DNA, 36 bp, synthetic construct
  source 1..36: mol_type = other DNA
ccgccacaagctcttcaaagtctcaggccctgcgac

SEQ ID NO: 2764 - DNA, 36 bp, synthetic construct
  source 1..36: mol_type = other DNA
ctcaaatctagatagcacatttctacttttgtagat

SEQ ID NO: 2765 - DNA, 36 bp, synthetic construct
  source 1..36: mol_type = other DNA
atctacaaaagtagaaatttcttataggcgttaaac

SEQ ID NO: 2766 - DNA, 36 bp, synthetic construct
  source 1..36: mol_type = other DNA
atctacaacagtagaaattttatttgggttctaaac

SEQ ID NO: 2767 - DNA, 39 bp, synthetic construct
  source 1..39: mol_type = other DNA
ttatctacaaaagtagaaatcttatatcgattttagata

SEQ ID NO: 2768 - DNA, 39 bp, synthetic construct
  source 1..39: mol_type = other DNA
attatctaaaatcgatataagatttctacttttgtagat

SEQ ID NO: 2769 - DNA, 36 bp, synthetic construct
  source 1..36: mol_type = other DNA
atctacaacagtagaaattttagttcactttgaaac

SEQ ID NO: 2770 - DNA, 36 bp, synthetic construct; identical to SEQ ID NO: 1843
  source 1..36: mol_type = other DNA

SEQ ID NO: 2771 - DNA, 36 bp, synthetic construct
  source 1..36: mol_type = other DNA
atctacaaaagtagaaattgtgtataggtattagag

SEQ ID NO: 2772 - DNA, 36 bp, synthetic construct; identical to SEQ ID NO: 2086
  source 1..36: mol_type = other DNA

SEQ ID NO: 2773 - DNA, 36 bp, synthetic construct; identical to SEQ ID NO: 2086
  source 1..36: mol_type = other DNA

SEQ ID NO: 2774 - DNA, 36 bp, synthetic construct; identical to SEQ ID NO: 2761
  source 1..36: mol_type = other DNA

SEQ ID NO: 2775 - DNA, 36 bp, synthetic construct; identical to SEQ ID NO: 1843
  source 1..36: mol_type = other DNA

SEQ ID NO: 2776 - DNA, 36 bp, synthetic construct
  source 1..36: mol_type = other DNA
gtgtccggcgtgatcgggttctcttctgcttgcttc

SEQ ID NO: 2777 - DNA, 36 bp, synthetic construct
  source 1..36: mol_type = other DNA
atctacaaaagtagaaattgaatataaatattagac

SEQ ID NO: 2778 - DNA, 36 bp, synthetic construct; identical to SEQ ID NO: 2550
  source 1..36: mol_type = other DNA

SEQ ID NO: 2779 - DNA, 36 bp, synthetic construct
  source 1..36: mol_type = other DNA
gtctaatccatatatcaaatttctacttttgtagat

SEQ ID NO: 2780 - DNA, 36 bp, synthetic construct
  source 1..36: mol_type = other DNA
atctacaatagtagaaattttaataatgctttaaac

SEQ ID NO: 2781 - DNA, 36 bp, synthetic construct
  source 1..36: mol_type = other DNA
atctacaatagtagaaattatataggcattatagcc

SEQ ID NO: 2782 - DNA, 36 bp, synthetic construct
  source 1..36: mol_type = other DNA
atctacaacagtagaaatttatatatcctcttagag

SEQ ID NO: 2783 - DNA, 36 bp, synthetic construct; identical to SEQ ID NO: 1905
  source 1..36: mol_type = other DNA

SEQ ID NO: 2784 - DNA, 36 bp, synthetic construct
  source 1..36: mol_type = other DNA
gtttaatagatatatccaatttctactttcgtagat

SEQ ID NO: 2785 - DNA, 36 bp, synthetic construct
  source 1..36: mol_type = other DNA
atctacaaaagtagaaattgaataggtgtattagag

SEQ ID NO: 2786 - DNA, 36 bp, synthetic construct
  source 1..36: mol_type = other DNA
gtctagaagcatgctctaatttctactgttgtagat

SEQ ID NO: 2787 - DNA, 36 bp, synthetic construct
  source 1..36: mol_type = other DNA
gtctagaagcttcagataatttctactattgtagat

SEQ ID NO: 2788 - DNA, 36 bp, synthetic construct
  source 1..36: mol_type = other DNA
ccgcctcacgattcctgaattcgcgccgactgaagc

SEQ ID NO: 2789 - DNA, 36 bp, synthetic construct; identical to SEQ ID NO: 1707
  source 1..36: mol_type = other DNA

SEQ ID NO: 2790 - DNA, 36 bp, synthetic construct; identical to SEQ ID NO: 2788
  source 1..36: mol_type = other DNA

SEQ ID NO: 2791 - DNA, 36 bp, synthetic construct
  source 1..36: mol_type = other DNA
atctacaaaagtagaaatttaatataggtgttcaag

SEQ ID NO: 2792 - DNA, 36 bp, synthetic construct
  source 1..36: mol_type = other DNA
ccgcctcaacgtcgcgtaatcgtcactaggggagac

SEQ ID NO: 2793 - DNA, 36 bp, synthetic construct; identical to SEQ ID NO: 2791
  source 1..36: mol_type = other DNA

SEQ ID NO: 2794 - DNA, 36 bp, synthetic construct; identical to SEQ ID NO: 1707
  source 1..36: mol_type = other DNA

SEQ ID NO: 2795 - DNA, 36 bp, synthetic construct
  source 1..36: mol_type = other DNA
atctacagaagtagaaatttaatacctggtctagcc

SEQ ID NO: 2796 - DNA, 36 bp, synthetic construct
  source 1..36: mol_type = other DNA
gtttgaactactaattaaatttctactgttgtagat

SEQ ID NO: 2797 - DNA, 36 bp, synthetic construct
  source 1..36: mol_type = other DNA
atttaaacgactaattaaatttctactattgtagat

SEQ ID NO: 2798 - DNA, 36 bp, synthetic construct; identical to SEQ ID NO: 2549
  source 1..36: mol_type = other DNA

SEQ ID NO: 2799 - DNA, 36 bp, synthetic construct
  source 1..36: mol_type = other DNA
gttgaatatctgtattggatttctacttttgtagat

SEQ ID NO: 2800 - DNA, 36 bp, synthetic construct
  source 1..36: mol_type = other DNA
atctacaatagtagaaattaaataagtcttttagac

SEQ ID NO: 2801 - DNA, 38 bp, synthetic construct
  source 1..38: mol_type = other DNA
atatctacaaaagtagaaattaaatataggtattagag

SEQ ID NO: 2802 - DNA, 36 bp, synthetic construct; identical to SEQ ID NO: 2568
  source 1..36: mol_type = other DNA

SEQ ID NO: 2803 - DNA, 36 bp, synthetic construct; identical to SEQ ID NO: 2341
  source 1..36: mol_type = other DNA

SEQ ID NO: 2804 - DNA, 36 bp, synthetic construct
  source 1..36: mol_type = other DNA
gtgtcagtcgatcattggcgcgctgggctgcgcgcc

SEQ ID NO: 2805 - DNA, 36 bp, synthetic construct
  source 1..36: mol_type = other DNA
gtctattccatatagtagatttctactttcgtagat

SEQ ID NO: 2806 - DNA, 36 bp, synthetic construct
  source 1..36: mol_type = other DNA
atctacaaaagtagaaattgaatatatgtattagag

SEQ ID NO: 2807 - DNA, 36 bp, synthetic construct
  source 1..36: mol_type = other DNA
atctacaaaagtagaaattgaatatatctattagac

SEQ ID NO: 2808 - DNA, 36 bp, synthetic construct
  source 1..36: mol_type = other DNA
atctacaagttagtagaaattataaggtctaaattc

SEQ ID NO: 2809 - DNA, 36 bp, synthetic construct
  source 1..36: mol_type = other DNA
gtttaagacaccaaaagaatttctactgttgtagat

SEQ ID NO: 2810 - DNA, 36 bp, synthetic construct
  source 1..36: mol_type = other DNA
atctacaacagtagaaattcttttggtgtcttaaac

SEQ ID NO: 2811 - DNA, 36 bp, synthetic construct
  source 1..36: mol_type = other DNA
ggcgcagacggcgcgatttcagggagcatgaggcgg

SEQ ID NO: 2812 - DNA, 36 bp, synthetic construct
  source 1..36: mol_type = other DNA
atctacaaaagtagaaatttactatcagtagtaaag

SEQ ID NO: 2813 - DNA, 36 bp, synthetic construct
  source 1..36: mol_type = other DNA
ccgccattcagtaacactaacatcagcgagtgcgac

SEQ ID NO: 2814 - DNA, 36 bp, synthetic construct
  source 1..36: mol_type = other DNA
gtttaaatccgatataagatttctacttttgtagat

SEQ ID NO: 2815 - DNA, 36 bp, synthetic construct; identical to SEQ ID NO: 1645
  source 1..36: mol_type = other DNA

SEQ ID NO: 2816 - DNA, 36 bp, synthetic construct
  source 1..36: mol_type = other DNA
gtctaatagactataaaaatttctactgttgtagat

SEQ ID NO: 2817 - DNA, 36 bp, synthetic construct
  source 1..36: mol_type = other DNA
gattaatctctgataataatttctacttatgtagat

SEQ ID NO: 2818 - DNA, 33 bp, synthetic construct
  source 1..33: mol_type = other DNA
tacaatagtagaaattttgtatggtctaacacc

SEQ ID NO: 2819 - DNA, 36 bp, synthetic construct
  source 1..36: mol_type = other DNA
atctacgatagtagaaattctatggttctcttagag

SEQ ID NO: 2820 - DNA, 36 bp, synthetic construct
  source 1..36: mol_type = other DNA
agctagaactcctcagaaatttctacttcggtagat

SEQ ID NO: 2821 - DNA, 36 bp, synthetic construct; identical to SEQ ID NO: 2820
  source 1..36: mol_type = other DNA

SEQ ID NO: 2822 - DNA, 36 bp, synthetic construct
  source 1..36: mol_type = other DNA
ccgcctcaacatgatttgaaatccagagggcggaac

SEQ ID NO: 2823 - DNA, 42 bp, synthetic construct
  source 1..42: mol_type = other DNA
taggtgcctaccgcatcgaatcctgtgagccggtcggaccta

SEQ ID NO: 2824 - DNA, 36 bp, synthetic construct
  source 1..36: mol_type = other DNA
ggcgcagtcgccgctgtttcaaaggtcttgaggcgg

SEQ ID NO: 2825 - DNA, 36 bp, synthetic construct; identical to SEQ ID NO: 2824
  source 1..36: mol_type = other DNA

SEQ ID NO: 2826 - DNA, 36 bp, synthetic construct
  source 1..36: mol_type = other DNA
gttgattcctctgcaaggttgatcagtttgaggcgg

SEQ ID NO: 2827 - DNA, 36 bp, synthetic construct
  source 1..36: mol_type = other DNA
atctacaaaagtagaaattttatatattgattaaac

SEQ ID NO: 2828 - DNA, 36 bp, synthetic construct; identical to SEQ ID NO: 2460
  source 1..36: mol_type = other DNA

SEQ ID NO: 2829 - DNA, 36 bp, synthetic construct
  source 1..36: mol_type = other DNA
ccgcctcacgcttcctgaaatcgctacggggggaac

SEQ ID NO: 2830 - DNA, 36 bp, synthetic construct
  source 1..36: mol_type = other DNA
ctctaatacatatagaagatttctacttttgtagat

SEQ ID NO: 2831 - DNA, 36 bp, synthetic construct
  source 1..36: mol_type = other DNA
cgctaatacccatattagatttctacttttgtagat

SEQ ID NO: 2832 - DNA, 36 bp, synthetic construct
  source 1..36: mol_type = other DNA
gtgtccgtttttgggaagtcttctgaaggggcccac

SEQ ID NO: 2833 - DNA, 36 bp, synthetic construct
  source 1..36: mol_type = other DNA
gtgtcaacggctgctaatccttgctgccctactgac

SEQ ID NO: 2834 - DNA, 36 bp, synthetic construct; identical to SEQ ID NO: 2819
  source 1..36: mol_type = other DNA

SEQ ID NO: 2835 - DNA, 36 bp, synthetic construct
  source 1..36: mol_type = other DNA
gccgcagaagcggatgcgggactaatcaactgacac

SEQ ID NO: 2836 - DNA, 36 bp, synthetic construct
  source 1..36: mol_type = other DNA
ccgcctcaagctgataggaatcactgcggagttaat

SEQ ID NO: 2837 - DNA, 36 bp, synthetic construct
  source 1..36: mol_type = other DNA
atctacgatagtagaaattattgaggccttatagcc

SEQ ID NO: 2838 - DNA, 36 bp, synthetic construct; identical to SEQ ID NO: 2460
  source 1..36: mol_type = other DNA

SEQ ID NO: 2839 - DNA, 36 bp, synthetic construct
  source 1..36: mol_type = other DNA
cccgcgctcgatgcgatgtcagcgagactgaggcgg

SEQ ID NO: 2840 - DNA, 36 bp, synthetic construct; identical to SEQ ID NO: 2830
  source 1..36: mol_type = other DNA

SEQ ID NO: 2841 - DNA, 36 bp, synthetic construct; identical to SEQ ID NO: 2788
  source 1..36: mol_type = other DNA

SEQ ID NO: 2842 - DNA, 36 bp, synthetic construct; identical to SEQ ID NO: 2839
  source 1..36: mol_type = other DNA

SEQ ID NO: 2843 - DNA, 36 bp, synthetic construct; identical to SEQ ID NO: 1707
  source 1..36: mol_type = other DNA

SEQ ID NO: 2844 - DNA, 36 bp, synthetic construct
  source 1..36: mol_type = other DNA
gccgcagtcagcgcgattccggggggcgtgaggcgg

SEQ ID NO: 2845 - DNA, 36 bp, synthetic construct
  source 1..36: mol_type = other DNA
gccgcagtcggcgcgattccggggggcgtgaggcgg

SEQ ID NO: 2846 - DNA, 36 bp, synthetic construct
  source 1..36: mol_type = other DNA
ccgccataccttctctgactttccgagctctgcggc

SEQ ID NO: 2847 - DNA, 36 bp, synthetic construct
  source 1..36: mol_type = other DNA
ccgcctcaaggttatctgctctgcatggtgtgcact

SEQ ID NO: 2848 - DNA, 36 bp, synthetic construct
  source 1..36: mol_type = other DNA
ctctacaattgatagccaatttctacttttgtagat

SEQ ID NO: 2849 - DNA, 38 bp, synthetic construct
  source 1..38: mol_type = other DNA
ctctacaattgatagccaatttctacttttgtagattt

SEQ ID NO: 2850 - DNA, 36 bp, synthetic construct
  source 1..36: mol_type = other DNA
atctacaaaagtagaaattggctatcaattgtagag

SEQ ID NO: 2851 - DNA, 36 bp, synthetic construct; identical to SEQ ID NO: 2848
  source 1..36: mol_type = other DNA

SEQ ID NO: 2852 - DNA, 36 bp, synthetic construct; identical to SEQ ID NO: 2848
  source 1..36: mol_type = other DNA

SEQ ID NO: 2853 - DNA, 36 bp, synthetic construct; identical to SEQ ID NO: 2848
  source 1..36: mol_type = other DNA

SEQ ID NO: 2854 - DNA, 36 bp, synthetic construct; identical to SEQ ID NO: 2848
  source 1..36: mol_type = other DNA

SEQ ID NO: 2855 - DNA, 38 bp, synthetic construct
  source 1..38: mol_type = other DNA
agatctacaaaagtagaaattggctatcaattgtagag

SEQ ID NO: 2856 - DNA, 36 bp, synthetic construct; identical to SEQ ID NO: 2848
  source 1..36: mol_type = other DNA

SEQ ID NO: 2857 - DNA, 38 bp, synthetic construct
  source 1..38: mol_type = other DNA
atctctacaattgatagccaatttctacttttgtagat

SEQ ID NO: 2858 - DNA, 36 bp, synthetic construct; identical to SEQ ID NO: 2848
  source 1..36: mol_type = other DNA

SEQ ID NO: 2859 - DNA, 36 bp, synthetic construct; identical to SEQ ID NO: 2848
  source 1..36: mol_type = other DNA

SEQ ID NO: 2860 - DNA, 36 bp, synthetic construct; identical to SEQ ID NO: 2848
  source 1..36: mol_type = other DNA

SEQ ID NO: 2861 - DNA, 38 bp, synthetic construct; identical to SEQ ID NO: 2855
  source 1..38: mol_type = other DNA

SEQ ID NO: 2862 - DNA, 36 bp, synthetic construct
  source 1..36: mol_type = other DNA
gtgtccgtccttgggaagcttcttggggggttagac

SEQ ID NO: 2863 - DNA, 36 bp, synthetic construct; identical to SEQ ID NO: 2788
  source 1..36: mol_type = other DNA

SEQ ID NO: 2864 - DNA, 36 bp, synthetic construct; identical to SEQ ID NO: 1707
  source 1..36: mol_type = other DNA

SEQ ID NO: 2865 - DNA, 36 bp, synthetic construct
  source 1..36: mol_type = other DNA
gtctaatacatatatcaaatttctacttttgtagat

SEQ ID NO: 2866 - DNA, 36 bp, synthetic construct
  source 1..36: mol_type = other DNA
ccgcctcacagtcgttgagagcgcgttgggcgcgac

SEQ ID NO: 2867 - DNA, 35 bp, synthetic construct
  source 1..35: mol_type = other DNA
tgtcagtcgatcattggcgcgctgggctgcgcgcc

SEQ ID NO: 2868 - DNA, 36 bp, synthetic construct
  source 1..36: mol_type = other DNA
gaaatttagaccttataatttctacttattgtagat

SEQ ID NO: 2869 - DNA, 36 bp, synthetic construct
  source 1..36: mol_type = other DNA
ggtgttagtatatacaaaatttctactattgtagat

SEQ ID NO: 2870 - DNA, 36 bp, synthetic construct
  source 1..36: mol_type = other DNA
gccgcagtcgccgcgacttcaggaatcgtgaggcgg

SEQ ID NO: 2871 - DNA, 36 bp, synthetic construct
  source 1..36: mol_type = other DNA
attccactctctgcgaaaatcgcaattttgaggcgg

SEQ ID NO: 2872 - DNA, 36 bp, synthetic construct
  source 1..36: mol_type = other DNA
gtcgcgcgcgccgcggtctcaagcagcgtgaggcgg

SEQ ID NO: 2873 - DNA, 36 bp, synthetic construct
  source 1..36: mol_type = other DNA
gtcgcggcatccacgaagccaatgaccttgtggcgg

SEQ ID NO: 2874 - DNA, 36 bp, synthetic construct
  source 1..36: mol_type = other DNA
ccgccacaaggtcattggcttcgtggatgccgcgac

SEQ ID NO: 2875 - DNA, 36 bp, synthetic construct; identical to SEQ ID NO: 2873
  source 1..36: mol_type = other DNA

SEQ ID NO: 2876 - DNA, 36 bp, synthetic construct; identical to SEQ ID NO: 2076
  source 1..36: mol_type = other DNA

SEQ ID NO: 2877 - DNA, 36 bp, synthetic construct; identical to SEQ ID NO: 2807
  source 1..36: mol_type = other DNA

SEQ ID NO: 2878 - DNA, 36 bp, synthetic construct; identical to SEQ ID NO: 2807
  source 1..36: mol_type = other DNA

SEQ ID NO: 2879 - DNA, 36 bp, synthetic construct
  source 1..36: mol_type = other DNA
gtcgcactcgctgatgttagtgttactgaatggcgg

SEQ ID NO: 2880 - DNA, 36 bp, synthetic construct
  source 1..36: mol_type = other DNA
gccgcggaggccgacgcggcgatgatcaatggacac

SEQ ID NO: 2881 - DNA, 36 bp, synthetic construct; identical to SEQ ID NO: 2611
  source 1..36: mol_type = other DNA

SEQ ID NO: 2882 - DNA, 36 bp, synthetic construct; identical to SEQ ID NO: 1734
  source 1..36: mol_type = other DNA

SEQ ID NO: 2883 - DNA, 36 bp, synthetic construct
  source 1..36: mol_type = other DNA
gtgtcagtcgatcaatggcgcgctggcctgcgcgcc

SEQ ID NO: 2884 - DNA, 36 bp, synthetic construct
  source 1..36: mol_type = other DNA
gccgcagtcaccgcgacttcaggaatcgtgaggcgg

SEQ ID NO: 2885 - DNA, 35 bp, synthetic construct
  source 1..35: mol_type = other DNA
ccgcctcaagatttctgaattcgcgccgactgaac

SEQ ID NO: 2886 - DNA, 36 bp, synthetic construct
  source 1..36: mol_type = other DNA
gtgtcagtcgatcccttacgtgtcaggtggtgcggc

SEQ ID NO: 2887 - DNA, 36 bp, synthetic construct
  source 1..36: mol_type = other DNA
atctacaatagtagaaattaaataagtcaaatagac

SEQ ID NO: 2888 - DNA, 36 bp, synthetic construct
  source 1..36: mol_type = other DNA
ccgccacaatctctttgtcagcgcgggtgctgcggc

SEQ ID NO: 2889 - DNA, 36 bp, synthetic construct
  source 1..36: mol_type = other DNA
gtagcattgaccattccgaacctcacctactgacac

SEQ ID NO: 2890 - DNA, 36 bp, synthetic construct
  source 1..36: mol_type = other DNA
gcttcagtcggcgcgacttcaggaatcgtgaggcgg

SEQ ID NO: 2891 - DNA, 38 bp, synthetic construct
  source 1..38: mol_type = other DNA
ccgcctcaatctctttggaatcacgggtgctgcgacgg

SEQ ID NO: 2892 - DNA, 36 bp, synthetic construct
  source 1..36: mol_type = other DNA
atctacaaaagtagaaatccaataggatgattaaac

SEQ ID NO: 2893 - DNA, 36 bp, synthetic construct
  source 1..36: mol_type = other DNA
atctacaacagtagaaattaatgccaaggcttagac

SEQ ID NO: 2894 - DNA, 36 bp, synthetic construct; identical to SEQ ID NO: 2617
  source 1..36: mol_type = other DNA

SEQ ID NO: 2895 - DNA, 36 bp, synthetic construct
  source 1..36: mol_type = other DNA
gccgcagtcgccgcgactgcggcaatcttgaggcgg

SEQ ID NO: 2896 - DNA, 36 bp, synthetic construct
  source 1..36: mol_type = other DNA
gtctaacaccgatattcaatttctacttttgtagat

SEQ ID NO: 2897 - DNA, 36 bp, synthetic construct
  source 1..36: mol_type = other DNA
gtttaatcatcctattggatttctacttttgtagat

SEQ ID NO: 2898 - DNA, 36 bp, synthetic construct; identical to SEQ ID NO: 2889
  source 1..36: mol_type = other DNA

SEQ ID NO: 2899 - DNA, 35 bp, synthetic construct
  source 1..35: mol_type = other DNA
gctgcagtcgccgctgtttcaaagagcctgaggcg

SEQ ID NO: 2900 - DNA, 36 bp, synthetic construct
  source 1..36: mol_type = other DNA
gccgcatcatccgacgcggccctgattgatggacac

SEQ ID NO: 2901 - DNA, 36 bp, synthetic construct
  source 1..36: mol_type = other DNA
gcttcagtcttgatgattccagcgagcttgaggcgg

SEQ ID NO: 2902 - DNA, 36 bp, synthetic construct
  source 1..36: mol_type = other DNA
gtgtccgtcgatcaggttcgcgccggctggtgcggg

SEQ ID NO: 2903 - DNA, 36 bp, synthetic construct
  source 1..36: mol_type = other DNA
gctgcagtcgccgctgtttcgaagatcctgaggcgg

SEQ ID NO: 2904 - DNA, 36 bp, synthetic construct
  source 1..36: mol_type = other DNA
gtctaaagacatatataaatttctactgttgtagat

SEQ ID NO: 2905 - DNA, 36 bp, synthetic construct
  source 1..36: mol_type = other DNA
ccgcctcaatctctttgaaacagcggcgactgcgtc

SEQ ID NO: 2906 - DNA, 36 bp, synthetic construct; identical to SEQ ID NO: 2905
  source 1..36: mol_type = other DNA

SEQ ID NO: 2907 - DNA, 36 bp, synthetic construct
  source 1..36: mol_type = other DNA
atctacaacagtagaaatttgactgagcctttaaac

SEQ ID NO: 2908 - DNA, 36 bp, synthetic construct
  source 1..36: mol_type = other DNA
gtcgccgcacccgtgatcccaaagagtttgtggcgg

SEQ ID NO: 2909 - DNA, 32 bp, synthetic construct
  source 1..32: mol_type = other DNA
gtttaagtagatactactaaaaagaccgatgg

SEQ ID NO: 2910 - DNA, 36 bp, synthetic construct; identical to SEQ ID NO: 2776
  source 1..36: mol_type = other DNA

SEQ ID NO: 2911 - DNA, 36 bp, synthetic construct; identical to SEQ ID NO: 2904
  source 1..36: mol_type = other DNA

SEQ ID NO: 2912 - DNA, 38 bp, synthetic construct
  source 1..38: mol_type = other DNA
aaccgcctcacgattcctgaagtcgcgccgactgaagc

SEQ ID NO: 2913 - DNA, 36 bp, synthetic construct
  source 1..36: mol_type = other DNA
ccgcctcagcatttctggaatcgcgacgactgctag

SEQ ID NO: 2914 - DNA, 34 bp, synthetic construct
  source 1..34: mol_type = other DNA
tgtttaagtagatactactgaaaagaccgatgga

SEQ ID NO: 2915 - DNA, 40 bp, synthetic construct
  source 1..40: mol_type = other DNA
gtcgacggccatgccggccaagcgatcggctgacacgcta

SEQ ID NO: 2916 - DNA, 35 bp, synthetic construct
  source 1..35: mol_type = other DNA
tctacaatagtagaaattaattatggcttatagcc

SEQ ID NO: 2917 - DNA, 36 bp, synthetic construct
  source 1..36: mol_type = other DNA
ccgcctcaagcttttggaaatcactgcggtaggaac

SEQ ID NO: 2918 - DNA, 36 bp, synthetic construct
  source 1..36: mol_type = other DNA
ccgcctgacgcttcctgaaacggcgctctctgcggc

SEQ ID NO: 2919 - DNA, 36 bp, synthetic construct
  source 1..36: mol_type = other DNA
gtttcagtcgccgcgattccagagagcttgaggcgg

SEQ ID NO: 2920 - DNA, 36 bp, synthetic construct
  source 1..36: mol_type = other DNA
gtctaatagatatatccaatttctacttttgtagat

SEQ ID NO: 2921 - DNA, 36 bp, synthetic construct; identical to SEQ ID NO: 2617
  source 1..36: mol_type = other DNA

SEQ ID NO: 2922 - DNA, 36 bp, synthetic construct
  source 1..36: mol_type = other DNA
gccgcagtcgccgcgaacgaagtgaccgtgaggcgg

SEQ ID NO: 2923 - DNA, 36 bp, synthetic construct
  source 1..36: mol_type = other DNA
gtctaaaagacctatttaatttctactattgtagat

SEQ ID NO: 2924 - DNA, 36 bp, synthetic construct
  source 1..36: mol_type = other DNA
atctacaatagtagaaattaatcaggccatatagac

SEQ ID NO: 2925 - DNA, 36 bp, synthetic construct
  source 1..36: mol_type = other DNA
atctacaatagtagaaatttttttagtcgtattgac

SEQ ID NO: 2926 - DNA, 36 bp, synthetic construct
  source 1..36: mol_type = other DNA
gtgattccgcacggtgtggaagtgatcggctgacac

SEQ ID NO: 2927 - DNA, 36 bp, synthetic construct
  source 1..36: mol_type = other DNA
gccggcgaattcgccggccaagtgatcgaccgacac

SEQ ID NO: 2928 - DNA, 36 bp, synthetic construct
  source 1..36: mol_type = other DNA
gtgtcagccgatcacttccacaccgtgcggaatcac

SEQ ID NO: 2929 - DNA, 36 bp, synthetic construct
  source 1..36: mol_type = other DNA
atctacaacagtagaaattatatatgtctattagac

SEQ ID NO: 2930 - DNA, 36 bp, synthetic construct; identical to SEQ ID NO: 2895
  source 1..36: mol_type = other DNA

SEQ ID NO: 2931 - DNA, 36 bp, synthetic construct
  source 1..36: mol_type = other DNA
gtctaataggcacatataatttctactatcgtagat

SEQ ID NO: 2932 - DNA, 36 bp, synthetic construct
  source 1..36: mol_type = other DNA
atctacaaaagtagaaattgaatatgcccattagag

SEQ ID NO: 2933 - DNA, 36 bp, synthetic construct
  source 1..36: mol_type = other DNA
ggctataaggctaatataatttctactatcgtagat

SEQ ID NO: 2934 - DNA, 36 bp, synthetic construct
  source 1..36: mol_type = other DNA
ccgcctcaccccccccggaatcgcggcgactgcggc

SEQ ID NO: 2935 - DNA, 36 bp, synthetic construct
  source 1..36: mol_type = other DNA
gtcggcgacgtcgccgaccaagtgatcaactgacac

SEQ ID NO: 2936 - DNA, 36 bp, synthetic construct
  source 1..36: mol_type = other DNA
atctacaaaagtagaaatttaatataggtattagag

SEQ ID NO: 2937 - DNA, 36 bp, synthetic construct
  source 1..36: mol_type = other DNA
gtgtccgccgatcaggttcctatcggggactccgcc

SEQ ID NO: 2938 - DNA, 36 bp, synthetic construct
  source 1..36: mol_type = other DNA
accgcagcgcccgagtttcggattagtttgaggcgg

SEQ ID NO: 2939 - DNA, 36 bp, synthetic construct
  source 1..36: mol_type = other DNA
cccgcagttcccgcgatgtgttttgaattgagacgg

SEQ ID NO: 2940 - DNA, 36 bp, synthetic construct
  source 1..36: mol_type = other DNA
gtgtcagataatcgcccttccgttcgatgggcccac

SEQ ID NO: 2941 - DNA, 36 bp, synthetic construct
  source 1..36: mol_type = other DNA
gtttaatccttatagtagatttctacttttgtagat

SEQ ID NO: 2942 - DNA, 36 bp, synthetic construct
  source 1..36: mol_type = other DNA
ccgcctcaagatttctgaaatcgcgtcgtctgcgaa

SEQ ID NO: 2943 - DNA, 36 bp, synthetic construct
  source 1..36: mol_type = other DNA
gtctaatcgatatatccaatttctacttttgtagat

SEQ ID NO: 2944 - DNA, 36 bp, synthetic construct
  source 1..36: mol_type = other DNA
gtgtcggttaatcagattagagtcggccggtaagac

SEQ ID NO: 2945 - DNA, 39 bp, synthetic construct
  source 1..39: mol_type = other DNA
gtgtcagcttatggagtaaaagtcgggcggtaagacttg

SEQ ID NO: 2946 - DNA, 36 bp, synthetic construct
  source 1..36: mol_type = other DNA
ctctaagagaggatttaaatttctactatcgtagat

SEQ ID NO: 2947 - DNA, 36 bp, synthetic construct
  source 1..36: mol_type = other DNA
gtcgcagtgggtccgagagccgggatcggctgacgc

SEQ ID NO: 2948 - DNA, 36 bp, synthetic construct
  source 1..36: mol_type = other DNA
ggcgaccacggcgcgattccagaaatcttgaggcgg

SEQ ID NO: 2949 - DNA, 36 bp, synthetic construct
  source 1..36: mol_type = other DNA
gcgtcagccgacccgcgttctcccagccactgcgaa

SEQ ID NO: 2950 - DNA, 36 bp, synthetic construct; identical to SEQ ID NO: 2949
  source 1..36: mol_type = other DNA

SEQ ID NO: 2951 - DNA, 36 bp, synthetic construct
  source 1..36: mol_type = other DNA
atcgcaccgcttgaaattgagttaattgactgacac

SEQ ID NO: 2952 - DNA, 38 bp, synthetic construct
  source 1..38: mol_type = other DNA
cccgcctcacgccccccggaattgcagcgactgcggcg

SEQ ID NO: 2953 - DNA, 36 bp, synthetic construct
  source 1..36: mol_type = other DNA
gttccttccgcagtgatttctaaaagcttgaggcgg

SEQ ID NO: 2954 - DNA, 36 bp, synthetic construct
  source 1..36: mol_type = other DNA
ccgcctcacgctgactcttttcgcgtcgacggcgac

SEQ ID NO: 2955 - DNA, 36 bp, synthetic construct
  source 1..36: mol_type = other DNA
gcgaaccaggctcagaagaacctgatcggcggacac

SEQ ID NO: 2956 - DNA, 36 bp, synthetic construct; identical to SEQ ID NO: 1842
  source 1..36: mol_type = other DNA

SEQ ID NO: 2957 - DNA, 36 bp, synthetic construct; identical to SEQ ID NO: 1772
  source 1..36: mol_type = other DNA

SEQ ID NO: 2958 - DNA, 36 bp, synthetic construct
  source 1..36: mol_type = other DNA
gggggccaagacgcgatttcagaaatcttgaggcgg

SEQ ID NO: 2959 - DNA, 37 bp, synthetic construct
  source 1..37: mol_type = other DNA
ctcgcagtggctggggagatgagggtcgactgacgcc

SEQ ID NO: 2960 - DNA, 36 bp, synthetic construct
  source 1..36: mol_type = other DNA
gcggcatccgcagcggattctcggagcttgaggcgg

SEQ ID NO: 2961 - DNA, 36 bp, synthetic construct; identical to SEQ ID NO: 1873
  source 1..36: mol_type = other DNA

SEQ ID NO: 2962 - DNA, 36 bp, synthetic construct; identical to SEQ ID NO: 1873
  source 1..36: mol_type = other DNA

SEQ ID NO: 2963 - DNA, 36 bp, synthetic construct; identical to SEQ ID NO: 1840
  source 1..36: mol_type = other DNA

SEQ ID NO: 2964 - DNA, 36 bp, synthetic construct
  source 1..36: mol_type = other DNA
ccgcctcatggttcctgaaatcgcggtcactgcggc

SEQ ID NO: 2965 - DNA, 36 bp, synthetic construct; identical to SEQ ID NO: 2951
  source 1..36: mol_type = other DNA

SEQ ID NO: 2966 - DNA, 36 bp, synthetic construct; identical to SEQ ID NO: 1763
  source 1..36: mol_type = other DNA

SEQ ID NO: 2967 - DNA, 36 bp, synthetic construct; identical to SEQ ID NO: 1873
  source 1..36: mol_type = other DNA

SEQ ID NO: 2968 - DNA, 36 bp, synthetic construct; identical to SEQ ID NO: 1873
  source 1..36: mol_type = other DNA

SEQ ID NO: 2969 - DNA, 36 bp, synthetic construct; identical to SEQ ID NO: 1840
  source 1..36: mol_type = other DNA

SEQ ID NO: 2970 - DNA, 36 bp, synthetic construct; identical to SEQ ID NO: 1933
  source 1..36: mol_type = other DNA

SEQ ID NO: 2971 - DNA, 36 bp, synthetic construct; identical to SEQ ID NO: 1763
  source 1..36: mol_type = other DNA

SEQ ID NO: 2972 - DNA, 36 bp, synthetic construct
  source 1..36: mol_type = other DNA
cgcgcagtcaccgcgacttcaggaatcgtgaggcgg

SEQ ID NO: 2973 - DNA, 36 bp, synthetic construct; identical to SEQ ID NO: 2964
  source 1..36: mol_type = other DNA

SEQ ID NO: 2974 - DNA, 36 bp, synthetic construct; identical to SEQ ID NO: 1680
  source 1..36: mol_type = other DNA

SEQ ID NO: 2975 - DNA, 36 bp, synthetic construct
  source 1..36: mol_type = other DNA
gtgtccattcatcagagccgcgtcggcctccgcggc

SEQ ID NO: 2976 - DNA, 36 bp, synthetic construct
  source 1..36: mol_type = other DNA
ccgcctcacgctcttcgaatcgttggcgactgacgg

SEQ ID NO: 2977 - DNA, 36 bp, synthetic construct
  source 1..36: mol_type = other DNA
gtgtcggcgtccgcgccaaacctgatcgacggacac

SEQ ID NO: 2978 - DNA, 36 bp, synthetic construct; identical to SEQ ID NO: 2919
  source 1..36: mol_type = other DNA

SEQ ID NO: 2979 - DNA, 36 bp, synthetic construct
  source 1..36: mol_type = other DNA
gtgtccatcaatgaggtgtgcttcaaccggtgatac

SEQ ID NO: 2980 - DNA, 36 bp, synthetic construct
  source 1..36: mol_type = other DNA
ccgcctcacttcccccggaatcgcggcgactgcggc

SEQ ID NO: 2981 - DNA, 36 bp, synthetic construct
  source 1..36: mol_type = other DNA
ccgcctcaggctgcttggcatcgcggcgactgcggc

SEQ ID NO: 2982 - DNA, 31 bp, synthetic construct
  source 1..31: mol_type = other DNA
ggttgatcgttccgccggcgaattcgccggc

SEQ ID NO: 2983 - DNA, 36 bp, synthetic construct; identical to SEQ ID NO: 1646
  source 1..36: mol_type = other DNA

SEQ ID NO: 2984 - DNA, 36 bp, synthetic construct; identical to SEQ ID NO: 1763
  source 1..36: mol_type = other DNA

SEQ ID NO: 2985 - DNA, 36 bp, synthetic construct
  source 1..36: mol_type = other DNA
gttgcagcgcctgaaattgagctaatcagctgacac

SEQ ID NO: 2986 - DNA, 36 bp, synthetic construct
  source 1..36: mol_type = other DNA
gccaaatcgttatagggaatttctactgttgtagat

SEQ ID NO: 2987 - DNA, 36 bp, synthetic construct
  source 1..36: mol_type = other DNA
ccgccacaatctctttggaatcacgggtgctgcggg

SEQ ID NO: 2988 - DNA, 36 bp, synthetic construct
  source 1..36: mol_type = other DNA
gcgggccgcgccgccgcagcccgcaacgactgacac

SEQ ID NO: 2989 - DNA, 36 bp, synthetic construct
  source 1..36: mol_type = other DNA
ccgcctcacggttcctgaagtcgcgccgactgcggc

SEQ ID NO: 2990 - DNA, 36 bp, synthetic construct
  source 1..36: mol_type = other DNA
gttcccccccgtgcgatttcaggaagcgtgaggcgg

SEQ ID NO: 2991 - DNA, 36 bp, synthetic construct; identical to SEQ ID NO: 2696
  source 1..36: mol_type = other DNA

SEQ ID NO: 2992 - DNA, 36 bp, synthetic construct
  source 1..36: mol_type = other DNA
ccgcctcacgctcttcgaaaccgcgggatgtgcgac

SEQ ID NO: 2993 - DNA, 36 bp, synthetic construct; identical to SEQ ID NO: 2696
  source 1..36: mol_type = other DNA

SEQ ID NO: 2994 - DNA, 36 bp, synthetic construct; identical to SEQ ID NO: 2992
  source 1..36: mol_type = other DNA

SEQ ID NO: 2995 - DNA, 36 bp, synthetic construct
  source 1..36: mol_type = other DNA
gtgtcagtcgatcaggaccggatcggctcgctccgc

SEQ ID NO: 2996 - DNA, 36 bp, synthetic construct
  source 1..36: mol_type = other DNA
ccgcctcaagctcactggaatcatgacgactgaagg

SEQ ID NO: 2997 - DNA, 36 bp, synthetic construct; identical to SEQ ID NO: 1708
  source 1..36: mol_type = other DNA

SEQ ID NO: 2998 - DNA, 39 bp, synthetic construct
  source 1..39: mol_type = other DNA
ccgcctcttcattcgtttccccccggacgttgcgggagc

SEQ ID NO: 2999 - DNA, 38 bp, synthetic construct
  source 1..38: mol_type = other DNA
tagccgcagtcgccgcgattccagcgaccttgaggcgg

SEQ ID NO: 3000 - DNA, 36 bp, synthetic construct
  source 1..36: mol_type = other DNA
gtgtccatcgatgagaaacccgtcaggcggtgcgcc

SEQ ID NO: 3001 - DNA, 37 bp, synthetic construct
  source 1..37: mol_type = other DNA
ccgcctcaaactgtctgaaaccgggggggctgcaata

SEQ ID NO: 3002 - DNA, 36 bp, synthetic construct
  source 1..36: mol_type = other DNA
gtctattagacagattgaatttctactattgtagat

SEQ ID NO: 3003 - DNA, 36 bp, synthetic construct
  source 1..36: mol_type = other DNA
gtgtccatcgatgagaaacccgtcaggcggtgcggc

SEQ ID NO: 3004 - DNA, 36 bp, synthetic construct
  source 1..36: mol_type = other DNA
gtgtcagtcgatcaggtgccagggagccggttcgac

SEQ ID NO: 3005 - DNA, 36 bp, synthetic construct
  source 1..36: mol_type = other DNA
gtcgcagtcgtcgcgattccggggggcgtgaggcgg

SEQ ID NO: 3006 - DNA, 36 bp, synthetic construct; identical to SEQ ID NO: 1707
  source 1..36: mol_type = other DNA

SEQ ID NO: 3007 - DNA, 36 bp, synthetic construct
  source 1..36: mol_type = other DNA
gtgtccgtcgatcagttttgcgccggcgcgtaccgc

SEQ ID NO: 3008 - DNA, 36 bp, synthetic construct
  source 1..36: mol_type = other DNA
ggcgcagaggttggcaccaacctgatcgacggacac

SEQ ID NO: 3009 - DNA, 36 bp, synthetic construct
  source 1..36: mol_type = other DNA
ccgcctcacgctttctgaaaccgcgacggggggaac

SEQ ID NO: 3010 - DNA, 36 bp, synthetic construct
  source 1..36: mol_type = other DNA
gcgcgcaggccagcgcgcttattgatcggctgacac

SEQ ID NO: 3011 - DNA, 36 bp, synthetic construct
  source 1..36: mol_type = other DNA
ggcgcaccgcctgacgggtttctcatcgatggacac

SEQ ID NO: 3012 - DNA, 36 bp, synthetic construct
  source 1..36: mol_type = other DNA
gtgtcagccgatcagaatcgaaccgggggggcgctc

SEQ ID NO: 3013 - DNA, 36 bp, synthetic construct
  source 1..36: mol_type = other DNA
gccgcagtcggcgcgacttcaggaaccgtgaggcgg

SEQ ID NO: 3014 - DNA, 35 bp, synthetic construct
  source 1..35: mol_type = other DNA
gtgccgacgtcggcaccaacctgatcgacggacac

SEQ ID NO: 3015 - DNA, 36 bp, synthetic construct
  source 1..36: mol_type = other DNA
ccgcctcaagctccgagaatccgctgcggatgccgc

SEQ ID NO: 3016 - DNA, 36 bp, synthetic construct
  source 1..36: mol_type = other DNA
ggaacagtccccgcgatttcaggaatcatgaggcgg

SEQ ID NO: 3017 - DNA, 36 bp, synthetic construct; identical to SEQ ID NO: 2788
  source 1..36: mol_type = other DNA

SEQ ID NO: 3018 - DNA, 36 bp, synthetic construct
  source 1..36: mol_type = other DNA
gtgtcaccggctctgtgaatccgtggcgtcggcgac

SEQ ID NO: 3019 - DNA, 25 bp, synthetic construct
  source 1..25: mol_type = other DNA
gtcgcagcacccgcgctgacaaaga

SEQ ID NO: 3020 - DNA, 36 bp, synthetic construct
  source 1..36: mol_type = other DNA
ggcgcgcaggccagcgcgccagtgatcgactgacac

SEQ ID NO: 3021 - DNA, 36 bp, synthetic construct
  source 1..36: mol_type = other DNA
atctacaatagtagaaatttttatttagtcttagac

SEQ ID NO: 3022 - DNA, 36 bp, synthetic construct
  source 1..36: mol_type = other DNA
gtcgcagcacccgcgctgacaaagagattgtggcgg

SEQ ID NO: 3023 - DNA, 36 bp, synthetic construct
  source 1..36: mol_type = other DNA
gcttcagtcagcgcgaattcaggaatcgtgaggcgg

SEQ ID NO: 3024 - DNA, 36 bp, synthetic construct; identical to SEQ ID NO: 2266
  source 1..36: mol_type = other DNA

SEQ ID NO: 3025 - DNA, 36 bp, synthetic construct; identical to SEQ ID NO: 2761
  source 1..36: mol_type = other DNA

SEQ ID NO: 3026 - DNA, 36 bp, synthetic construct
  source 1..36: mol_type = other DNA
gtcccccccgtagcgatctcaggaaacgtgaggcgg

SEQ ID NO: 3027 - DNA, 36 bp, synthetic construct
  source 1..36: mol_type = other DNA
gccgcgtcgatcgacgcggccttgatcaatggacac

SEQ ID NO: 3028 - DNA, 36 bp, synthetic construct
  source 1..36: mol_type = other DNA
gcttcagtccccacgattcagaggagcttgaggcgg

SEQ ID NO: 3029 - DNA, 36 bp, synthetic construct
  source 1..36: mol_type = other DNA
ccgcctcacgattcctgaattcgcgccgactgaaac

SEQ ID NO: 3030 - DNA, 36 bp, synthetic construct
  source 1..36: mol_type = other DNA
ccggccctggccgatgcgaagctgatcgacggacac

SEQ ID NO: 3031 - DNA, 36 bp, synthetic construct; identical to SEQ ID NO: 2617
  source 1..36: mol_type = other DNA

SEQ ID NO: 3032 - DNA, 36 bp, synthetic construct
  source 1..36: mol_type = other DNA
gtgtcagccgattagaagcgagaatccttgcttgcc

SEQ ID NO: 3033 - DNA, 36 bp, synthetic construct
  source 1..36: mol_type = other DNA
gtgccgcggaggccgacgcggccctgatggatggac

SEQ ID NO: 3034 - DNA, 36 bp, synthetic construct
  source 1..36: mol_type = other DNA
ctctaatacacctattaaatttctacttttgtagat

SEQ ID NO: 3035 - DNA, 36 bp, synthetic construct
  source 1..36: mol_type = other DNA
gttgccgacgttggaactgacctgatcgatggacac

SEQ ID NO: 3036 - DNA, 36 bp, synthetic construct
  source 1..36: mol_type = other DNA
gcatcagtcgccacgattcaggagagcttgaggcgg

SEQ ID NO: 3037 - DNA, 36 bp, synthetic construct
  source 1..36: mol_type = other DNA
gccgcagcacccgtgattccaaagagattgaggcgg

SEQ ID NO: 3038 - DNA, 36 bp, synthetic construct
  source 1..36: mol_type = other DNA
ggcgcgcaggccagcgcgccggtgatcgactgacac

SEQ ID NO: 3039 - DNA, 36 bp, synthetic construct; identical to SEQ ID NO: 3000
  source 1..36: mol_type = other DNA

SEQ ID NO: 3040 - DNA, 39 bp, synthetic construct
  source 1..39: mol_type = other DNA
gcggtcgaaccggctccctggcacctgatcgactgacac

SEQ ID NO: 3041 - DNA, 36 bp, synthetic construct
  source 1..36: mol_type = other DNA
cgcgcagtcgccacagttccggggggcgtgaggcgg

SEQ ID NO: 3042 - DNA, 36 bp, synthetic construct
  source 1..36: mol_type = other DNA
atctacaaaagtagaaattacttatcagttgtagag

SEQ ID NO: 3043 - DNA, 36 bp, synthetic construct
  source 1..36: mol_type = other DNA
gtgtccgttgatcagatctgcgccaacgtgagctac

SEQ ID NO: 3044 - DNA, 36 bp, synthetic construct
  source 1..36: mol_type = other DNA
atctacaaaagtagaaatctactataaggattaaac

SEQ ID NO: 3045 - DNA, 36 bp, synthetic construct; identical to SEQ ID NO: 3044
  source 1..36: mol_type = other DNA

SEQ ID NO: 3046 - DNA, 36 bp, synthetic construct; identical to SEQ ID NO: 3044
  source 1..36: mol_type = other DNA

SEQ ID NO: 3047 - DNA, 36 bp, synthetic construct; identical to SEQ ID NO: 2895
  source 1..36: mol_type = other DNA

SEQ ID NO: 3048 - DNA, 35 bp, synthetic construct
  source 1..35: mol_type = other DNA
ttccagtcgccgcgattccggggggcgtgaggcgg

SEQ ID NO: 3049 - DNA, 36 bp, synthetic construct
  source 1..36: mol_type = other DNA
gccgcgtcggccgacgcggctctgatcgatggacac

SEQ ID NO: 3050 - DNA, 37 bp, synthetic construct
  source 1..37: mol_type = other DNA
ggtgccgacgtcggcaccaacctgatcgacggacact

SEQ ID NO: 3051 - DNA, 36 bp, synthetic construct
  source 1..36: mol_type = other DNA
gttgaagccgcttcggcgaatgcgatcagccgacac

SEQ ID NO: 3052 - DNA, 36 bp, synthetic construct
  source 1..36: mol_type = other DNA
gccgcggaggccgacgcggccctgatggatggacac

SEQ ID NO: 3053 - DNA, 36 bp, synthetic construct
  source 1..36: mol_type = other DNA
gtgtcagcagatcagccagtcggctcttgagtcgac

SEQ ID NO: 3054 - DNA, 36 bp, synthetic construct
  source 1..36: mol_type = other DNA
gtgtcagtcgatcaggagcgagccggctcgctccgc

SEQ ID NO: 3055 - DNA, 36 bp, synthetic construct; identical to SEQ ID NO: 2742
  source 1..36: mol_type = other DNA

SEQ ID NO: 3056 - DNA, 36 bp, synthetic construct
  source 1..36: mol_type = other DNA
gtgtcagtcgatcaggttagtaccgaagaggtctgc

SEQ ID NO: 3057 - DNA, 38 bp, synthetic construct
  source 1..38: mol_type = other DNA
aaccgcctcacgctcgcgccgctcgcggaggcggcggc

SEQ ID NO: 3058 - DNA, 38 bp, synthetic construct
  source 1..38: mol_type = other DNA
gccgccgggctcgccgacccgctgatctgctgacacag

SEQ ID NO: 3059 - DNA, 36 bp, synthetic construct; identical to SEQ ID NO: 1773
  source 1..36: mol_type = other DNA

SEQ ID NO: 3060 - DNA, 36 bp, synthetic construct
  source 1..36: mol_type = other DNA
gtgtcctcaggtcaagttcggattagaggcggctac

SEQ ID NO: 3061 - DNA, 36 bp, synthetic construct; identical to SEQ ID NO: 1773
  source 1..36: mol_type = other DNA

SEQ ID NO: 3062 - DNA, 37 bp, synthetic construct
  source 1..37: mol_type = other DNA
gtagggcgaccaaacgcaaaggcggttatccgacacc

SEQ ID NO: 3063 - DNA, 36 bp, synthetic construct
  source 1..36: mol_type = other DNA
gtgtcagccgatcggatagccgttggccagatcgac

SEQ ID NO: 3064 - DNA, 36 bp, synthetic construct
  source 1..36: mol_type = other DNA
ggcgcgcaggacagcgcgctcatgatcgactgacac

SEQ ID NO: 3065 - DNA, 36 bp, synthetic construct
  source 1..36: mol_type = other DNA
gtttaaaggactattaaaatttctactgttgtagat

SEQ ID NO: 3066 - DNA, 36 bp, synthetic construct
  source 1..36: mol_type = other DNA
gtgtccgccgatctccattccgttgcgccgatcggc

SEQ ID NO: 3067 - DNA, 34 bp, synthetic construct
  source 1..34: mol_type = other DNA
gtcgcaccccgcgcgggtgcgtgtattgaaacgg

SEQ ID NO: 3068 - DNA, 36 bp, synthetic construct
  source 1..36: mol_type = other DNA
gttgccgacgtcagcaccaacctgatcgacggacac

SEQ ID NO: 3069 - DNA, 36 bp, synthetic construct; identical to SEQ ID NO: 1796
  source 1..36: mol_type = other DNA

SEQ ID NO: 3070 - DNA, 36 bp, synthetic construct
  source 1..36: mol_type = other DNA
gtgtccatccatcagggccgcgtcggcctccgcagc

SEQ ID NO: 3071 - DNA, 36 bp, synthetic construct
  source 1..36: mol_type = other DNA
gtgtcagtcgatcatgagcgcgctggcctgcgcgct

SEQ ID NO: 3072 - DNA, 36 bp, synthetic construct
  source 1..36: mol_type = other DNA
gttttcgacgccggtactaacctgatcgacagacac

SEQ ID NO: 3073 - DNA, 36 bp, synthetic construct
  source 1..36: mol_type = other DNA
gtgtccgtcgatcaggttggtgtcgacatcggcacc

SEQ ID NO: 3074 - DNA, 36 bp, synthetic construct; identical to SEQ ID NO: 2475
  source 1..36: mol_type = other DNA

SEQ ID NO: 3075 - DNA, 36 bp, synthetic construct
  source 1..36: mol_type = other DNA
gtgtccatcgatcaaggccgcgtcggccgacgcggc

SEQ ID NO: 3076 - DNA, 36 bp, synthetic construct
  source 1..36: mol_type = other DNA
ggctataggccactaataatttctactatcgtagat

SEQ ID NO: 3077 - DNA, 36 bp, synthetic construct
  source 1..36: mol_type = other DNA
gtgtcagtcgatcgagatgccggcgtactcgtcggc

SEQ ID NO: 3078 - DNA, 36 bp, synthetic construct
  source 1..36: mol_type = other DNA
gtttaagagacccaaaaaatttctactattgtagat

SEQ ID NO: 3079 - DNA, 37 bp, synthetic construct
  source 1..37: mol_type = other DNA
gtgtcagcagatctggttcctttcaccgtcggcgagg

SEQ ID NO: 3080 - DNA, 37 bp, synthetic construct
  source 1..37: mol_type = other DNA
gcggtccgcgccggcgcggacctgatcgacggacacc

SEQ ID NO: 3081 - DNA, 36 bp, synthetic construct
  source 1..36: mol_type = other DNA
gtcggctcataagccgactccccgagctgccgacac

SEQ ID NO: 3082 - DNA, 36 bp, synthetic construct
  source 1..36: mol_type = other DNA
ctcgccgacggtgaaaggaaccagatctgctgacac

SEQ ID NO: 3083 - DNA, 36 bp, synthetic construct; identical to SEQ ID NO: 1773
  source 1..36: mol_type = other DNA

SEQ ID NO: 3084 - DNA, 36 bp, synthetic construct; identical to SEQ ID NO: 2592
  source 1..36: mol_type = other DNA

SEQ ID NO: 3085 - DNA, 36 bp, synthetic construct
  source 1..36: mol_type = other DNA
gtgtcagccgatcacttccacactgtgaggagccgc

SEQ ID NO: 3086 - DNA, 38 bp, synthetic construct
  source 1..38: mol_type = other DNA
gtcgcagtcgtcgcgatttcagaaaagctgaggcggat

SEQ ID NO: 3087 - DNA, 36 bp, synthetic construct
  source 1..36: mol_type = other DNA
ccgcctcacgtttctcaaaaccgcggggggcgcgac

SEQ ID NO: 3088 - DNA, 34 bp, synthetic construct
  source 1..34: mol_type = other DNA
gtcggctcatccgccgacaaactgatctgccgac

SEQ ID NO: 3089 - DNA, 35 bp, synthetic construct; identical to SEQ ID NO: 1825
  source 1..35: mol_type = other DNA

SEQ ID NO: 3090 - DNA, 36 bp, synthetic construct; identical to SEQ ID NO: 1773
  source 1..36: mol_type = other DNA

SEQ ID NO: 3091 - DNA, 33 bp, synthetic construct
  source 1..33: mol_type = other DNA
gccgcagtcgccgcgattccgggggaagtgagg

SEQ ID NO: 3092 - DNA, 36 bp, synthetic construct; identical to SEQ ID NO: 1734
  source 1..36: mol_type = other DNA

SEQ ID NO: 3093 - DNA, 36 bp, synthetic construct
  source 1..36: mol_type = other DNA
ctcgaatacctatattaaatttctacttttgtagat

SEQ ID NO: 3094 - DNA, 36 bp, synthetic construct
  source 1..36: mol_type = other DNA
gccgcagtcgccgcgattccgggggaagtgaggcgg

SEQ ID NO: 3095 - DNA, 36 bp, synthetic construct; identical to SEQ ID NO: 2788
  source 1..36: mol_type = other DNA

SEQ ID NO: 3096 - DNA, 32 bp, synthetic construct
  source 1..32: mol_type = other DNA
ctctcatctcgcgcgcgcctgcgggctgacac

SEQ ID NO: 3097 - DNA, 32 bp, synthetic construct
  source 1..32: mol_type = other DNA
ctctcatctcgcgcgcgtctgcgggctgacac

SEQ ID NO: 3098 - DNA, 36 bp, synthetic construct; identical to SEQ ID NO: 1621
  source 1..36: mol_type = other DNA

SEQ ID NO: 3099 - DNA, 37 bp, synthetic construct
  source 1..37: mol_type = other DNA
gtgtccgttgatcaggttggttccaaggacagcgacc

SEQ ID NO: 3100 - DNA, 36 bp, synthetic construct
  source 1..36: mol_type = other DNA
gtgtccgttgatcaggttggttccaaggacagcgac

SEQ ID NO: 3101 - DNA, 36 bp, synthetic construct; identical to SEQ ID NO: 3100
  source 1..36: mol_type = other DNA

SEQ ID NO: 3102 - DNA, 36 bp, synthetic construct; identical to SEQ ID NO: 3100
  source 1..36: mol_type = other DNA

SEQ ID NO: 3103 - DNA, 36 bp, synthetic construct; identical to SEQ ID NO: 3100
  source 1..36: mol_type = other DNA

SEQ ID NO: 3104 - DNA, 36 bp, synthetic construct; identical to SEQ ID NO: 1752
  source 1..36: mol_type = other DNA

SEQ ID NO: 3105 - DNA, 36 bp, synthetic construct
  source 1..36: mol_type = other DNA
gtggcagacgtcggaaatgagccgatcggcggacac

SEQ ID NO: 3106 - DNA, 36 bp, synthetic construct; identical to SEQ ID NO: 1823
  source 1..36: mol_type = other DNA

SEQ ID NO: 3107 - DNA, 36 bp, synthetic construct
  source 1..36: mol_type = other DNA
ggcggcgaattcgccggcatctcgatcgaccgacac

SEQ ID NO: 3108 - DNA, 36 bp, synthetic construct; identical to SEQ ID NO: 1679
  source 1..36: mol_type = other DNA

SEQ ID NO: 3109 - DNA, 36 bp, synthetic construct
  source 1..36: mol_type = other DNA
gtgtcggtggatcagtgcgtcggctactgagtcgac

SEQ ID NO: 3110 - DNA, 36 bp, synthetic construct
  source 1..36: mol_type = other DNA
gtttaatacctataagaaatttctacttttgtagat

SEQ ID NO: 3111 - DNA, 36 bp, synthetic construct; identical to SEQ ID NO: 1681
  source 1..36: mol_type = other DNA

SEQ ID NO: 3112 - DNA, 36 bp, synthetic construct; identical to SEQ ID NO: 2493
  source 1..36: mol_type = other DNA

SEQ ID NO: 3113 - DNA, 36 bp, synthetic construct; identical to SEQ ID NO: 1823
  source 1..36: mol_type = other DNA

SEQ ID NO: 3114 - DNA, 36 bp, synthetic construct
  source 1..36: mol_type = other DNA
gcttcagtcgtcgcgacttcaggaatcgtgaggcgg

SEQ ID NO: 3115 - DNA, 37 bp, synthetic construct
  source 1..37: mol_type = other DNA
gaggaaatttcctcctcacaacagcgggcttggacac

SEQ ID NO: 3116 - DNA, 36 bp, synthetic construct
  source 1..36: mol_type = other DNA
gccgaacgagctggttcgctactgaacggctgacac

SEQ ID NO: 3117 - DNA, 36 bp, synthetic construct
  source 1..36: mol_type = other DNA
ggcgcgcaggcgagcgcgccaatgatcgactgacac

SEQ ID NO: 3118 - DNA, 33 bp, synthetic construct
  source 1..33: mol_type = other DNA
gtttcaatccacgccccccgcgtggggggcgac

SEQ ID NO: 3119 - DNA, 36 bp, synthetic construct
  source 1..36: mol_type = other DNA
gtgtcagtcgatcattggcgcgctcgcctgcgcgcc

SEQ ID NO: 3120 - DNA, 36 bp, synthetic construct
  source 1..36: mol_type = other DNA
atctacaaaagtagaaattggatattgctattagac

SEQ ID NO: 3121 - DNA, 36 bp, synthetic construct
  source 1..36: mol_type = other DNA
ccgcctcacggttcctgaagtcgcggcgactgcggc

SEQ ID NO: 3122 - DNA, 36 bp, synthetic construct
  source 1..36: mol_type = other DNA
gtgtccattgatcatcgccgcgtcggcctccgcggc

SEQ ID NO: 3123 - DNA, 36 bp, synthetic construct; identical to SEQ ID NO: 3122
  source 1..36: mol_type = other DNA

SEQ ID NO: 3124 - DNA, 36 bp, synthetic construct
  source 1..36: mol_type = other DNA
atctacaacagtagaaattaaaacgggtattaaaac

SEQ ID NO: 3125 - DNA, 36 bp, synthetic construct
  source 1..36: mol_type = other DNA
gtggcagaagtcggaaccgatctgatcaactgacac

SEQ ID NO: 3126 - DNA, 34 bp, synthetic construct
  source 1..34: mol_type = other DNA
gtagcacaagccggcgtgaagctaatcaactgac

SEQ ID NO: 3127 - DNA, 36 bp, synthetic construct
  source 1..36: mol_type = other DNA
ggtgccgaagttggcaacaacctgatcgacggacac

SEQ ID NO: 3128 - DNA, 36 bp, synthetic construct
  source 1..36: mol_type = other DNA
gtagcacaagccggcgtgaagctaatcaactgacac

SEQ ID NO: 3129 - DNA, 36 bp, synthetic construct
  source 1..36: mol_type = other DNA
cgcgcgcaggccagcgcgccgatgatcgactgacac

SEQ ID NO: 3130 - DNA, 36 bp, synthetic construct; identical to SEQ ID NO: 2804
  source 1..36: mol_type = other DNA

SEQ ID NO: 3131 - DNA, 36 bp, synthetic construct; identical to SEQ ID NO: 2493
  source 1..36: mol_type = other DNA

SEQ ID NO: 3132 - DNA, 36 bp, synthetic construct
  source 1..36: mol_type = other DNA
agcgcgcaggccagcgcgctcatgatcgactgacac

SEQ ID NO: 3133 - DNA, 36 bp, synthetic construct; identical to SEQ ID NO: 3132
  source 1..36: mol_type = other DNA

SEQ ID NO: 3134 - DNA, 35 bp, synthetic construct
  source 1..35: mol_type = other DNA
gtgtccattgatcatcgccgcgtcggcctccgcgg

SEQ ID NO: 3135 - DNA, 38 bp, synthetic construct
  source 1..38: mol_type = other DNA
gagtgtcagccggtgagttccacgccggcgtggaactc

SEQ ID NO: 3136 - DNA, 36 bp, synthetic construct
  source 1..36: mol_type = other DNA
gtcggttcagcccccaaaccatcgatctgccgacac

SEQ ID NO: 3137 - DNA, 36 bp, synthetic construct
  source 1..36: mol_type = other DNA
gtgtccatcgatcagagccgcatcggcctgcgcggc

SEQ ID NO: 3138 - DNA, 36 bp, synthetic construct
  source 1..36: mol_type = other DNA
gtctaatacctatattcaatttctacttttgtagat

SEQ ID NO: 3139 - DNA, 37 bp, synthetic construct
  source 1..37: mol_type = other DNA
cgtgtccgtcgatcagatcggtgccgacatcagcaac

SEQ ID NO: 3140 - DNA, 36 bp, synthetic construct
  source 1..36: mol_type = other DNA
gtcccccccgtcgcgatttcaggaagcgtgaggcgg

SEQ ID NO: 3141 - DNA, 36 bp, synthetic construct; identical to SEQ ID NO: 1846
  source 1..36: mol_type = other DNA

SEQ ID NO: 3142 - DNA, 36 bp, synthetic construct
  source 1..36: mol_type = other DNA
ggctcctacgttgaaactagcctgatcggctgacac

SEQ ID NO: 3143 - DNA, 36 bp, synthetic construct; identical to SEQ ID NO: 3142
  source 1..36: mol_type = other DNA

SEQ ID NO: 3144 - DNA, 36 bp, synthetic construct; identical to SEQ ID NO: 1715
  source 1..36: mol_type = other DNA

SEQ ID NO: 3145 - DNA, 36 bp, synthetic construct
  source 1..36: mol_type = other DNA
gccgcggaggccgacgcggccatgttgaatggacac

SEQ ID NO: 3146 - DNA, 37 bp, synthetic construct
  source 1..37: mol_type = other DNA
cgccgcatcacccgacgcggccctgatcgacggacac

SEQ ID NO: 3147 - DNA, 36 bp, synthetic construct
  source 1..36: mol_type = other DNA
gtccgccgccgcgtcgcggcggcgatcaactgacac

SEQ ID NO: 3148 - DNA, 36 bp, synthetic construct
  source 1..36: mol_type = other DNA
gccgcatcgcccgacgcggccttgatcgatggacac

SEQ ID NO: 3149 - DNA, 36 bp, synthetic construct; identical to SEQ ID NO: 2115
  source 1..36: mol_type = other DNA

SEQ ID NO: 3150 - DNA, 36 bp, synthetic construct
  source 1..36: mol_type = other DNA
gtgtctgtcgatcaggtcagtgctgacgtcggcgcc

SEQ ID NO: 3151 - DNA, 36 bp, synthetic construct
  source 1..36: mol_type = other DNA
gtgtcggtcgatctgattcacttcggagggcgctgc

SEQ ID NO: 3152 - DNA, 36 bp, synthetic construct
  source 1..36: mol_type = other DNA
gtttccctgggtacaaccagggccctattgaaacaa

SEQ ID NO: 3153 - DNA, 36 bp, synthetic construct
  source 1..36: mol_type = other DNA
ggcgcactggttcgcgcgcctttgatcgacggacac

SEQ ID NO: 3154 - DNA, 36 bp, synthetic construct; identical to SEQ ID NO: 1853
  source 1..36: mol_type = other DNA

SEQ ID NO: 3155 - DNA, 36 bp, synthetic construct
  source 1..36: mol_type = other DNA
gtgtccatcgatgagaaacccgtcaagcggtgcgcc

SEQ ID NO: 3156 - DNA, 38 bp, synthetic construct
  source 1..38: mol_type = other DNA
gtgtccgccgatcagggttgttccaaggttggaaacga

SEQ ID NO: 3157 - DNA, 36 bp, synthetic construct
  source 1..36: mol_type = other DNA
gtgtccgccgatcagggttgttccaaggttggaaac

SEQ ID NO: 3158 - DNA, 36 bp, synthetic construct; identical to SEQ ID NO: 3105
  source 1..36: mol_type = other DNA

SEQ ID NO: 3159 - DNA, 36 bp, synthetic construct; identical to SEQ ID NO: 3105
  source 1..36: mol_type = other DNA

SEQ ID NO: 3160 - DNA, 36 bp, synthetic construct
  source 1..36: mol_type = other DNA
atctacaaaagtagaaattggatatatcgattaaac

SEQ ID NO: 3161 - DNA, 36 bp, synthetic construct
  source 1..36: mol_type = other DNA
gccgctgccgccgcgaacgaagtgagcgtgaggcgg

SEQ ID NO: 3162 - DNA, 36 bp, synthetic construct; identical to SEQ ID NO: 2761
  source 1..36: mol_type = other DNA

SEQ ID NO: 3163 - DNA, 36 bp, synthetic construct
  source 1..36: mol_type = other DNA
ggcgccgacgtcagcactgacctgatcgacagacac

SEQ ID NO: 3164 - DNA, 36 bp, synthetic construct; identical to SEQ ID NO: 1708
  source 1..36: mol_type = other DNA

SEQ ID NO: 3165 - DNA, 36 bp, synthetic construct; identical to SEQ ID NO: 2788
  source 1..36: mol_type = other DNA

SEQ ID NO: 3166 - DNA, 36 bp, synthetic construct; identical to SEQ ID NO: 2883
  source 1..36: mol_type = other DNA

SEQ ID NO: 3167 - DNA, 36 bp, synthetic construct
  source 1..36: mol_type = other DNA
ccgcctcaaagcctttgttatcgcggtatctgatgg

SEQ ID NO: 3168 - DNA, 36 bp, synthetic construct
  source 1..36: mol_type = other DNA
gccgcagtcgccgcgattccagcgagcttgaggcgg

SEQ ID NO: 3169 - DNA, 36 bp, synthetic construct; identical to SEQ ID NO: 2990
  source 1..36: mol_type = other DNA

SEQ ID NO: 3170 - DNA, 36 bp, synthetic construct; identical to SEQ ID NO: 2948
  source 1..36: mol_type = other DNA

SEQ ID NO: 3171 - DNA, 36 bp, synthetic construct
  source 1..36: mol_type = other DNA
ccgcctcacgcttcctgaaatcgcgacggggggaac

SEQ ID NO: 3172 - DNA, 36 bp, synthetic construct
  source 1..36: mol_type = other DNA
gtttcagtcgccgcgatttcagagagcttgaggcgg

SEQ ID NO: 3173 - DNA, 36 bp, synthetic construct
  source 1..36: mol_type = other DNA
cccgcaccatccgacaaggccctgaaagatggacac

SEQ ID NO: 3174 - DNA, 36 bp, synthetic construct
  source 1..36: mol_type = other DNA
ccgcctcaagcttctctgaatcgcggcgactgcggc

SEQ ID NO: 3175 - DNA, 36 bp, synthetic construct
  source 1..36: mol_type = other DNA
gtcgcagtgtgcttcccgcagcggttcagcggacac

SEQ ID NO: 3176 - DNA, 36 bp, synthetic construct
  source 1..36: mol_type = other DNA
gtgtccgtcgatcaggtccgcgtcgacgtcggcgcc

SEQ ID NO: 3177 - DNA, 36 bp, synthetic construct
  source 1..36: mol_type = other DNA
ccgcctcacgccccccggaatcgcgccgactgcggc

SEQ ID NO: 3178 - DNA, 36 bp, synthetic construct
  source 1..36: mol_type = other DNA
gccgcagtcgccgcgattcagaggggcgtgaggcgg

SEQ ID NO: 3179 - DNA, 36 bp, synthetic construct
  source 1..36: mol_type = other DNA
gccgcagtcgccgcgaatccggggggcgtgaggcgg

SEQ ID NO: 3180 - DNA, 36 bp, synthetic construct; identical to SEQ ID NO: 1708
  source 1..36: mol_type = other DNA

SEQ ID NO: 3181 - DNA, 36 bp, synthetic construct
  source 1..36: mol_type = other DNA
gcttcagtcggtgcgaattcaggaatcgtgaggcgg

SEQ ID NO: 3182 - DNA, 36 bp, synthetic construct
  source 1..36: mol_type = other DNA
ccgcctgtcgctgcgccgcttcgcggcgggcgcgac

SEQ ID NO: 3183 - DNA, 36 bp, synthetic construct
  source 1..36: mol_type = other DNA
gtgtccattgatccgcaccgcgtcagttgttgcggc

SEQ ID NO: 3184 - DNA, 36 bp, synthetic construct; identical to SEQ ID NO: 2890
  source 1..36: mol_type = other DNA

SEQ ID NO: 3185 - DNA, 38 bp, synthetic construct
  source 1..38: mol_type = other DNA
tgccgcctcacgattcccgcagtcgcggcgactgcggc

SEQ ID NO: 3186 - DNA, 36 bp, synthetic construct; identical to SEQ ID NO: 1707
  source 1..36: mol_type = other DNA

SEQ ID NO: 3187 - DNA, 36 bp, synthetic construct
  source 1..36: mol_type = other DNA
gccgcagtcgccgcaattccggggggcgtgaggcgg

SEQ ID NO: 3188 - DNA, 36 bp, synthetic construct; identical to SEQ ID NO: 3172
  source 1..36: mol_type = other DNA

SEQ ID NO: 3189 - DNA, 36 bp, synthetic construct; identical to SEQ ID NO: 1707
  source 1..36: mol_type = other DNA

SEQ ID NO: 3190 - DNA, 36 bp, synthetic construct
  source 1..36: mol_type = other DNA
ccgcctcacgattcctgaagtcgcgccgactgaagc

SEQ ID NO: 3191 - DNA, 36 bp, synthetic construct
  source 1..36: mol_type = other DNA
ccgcctcaagattcccgcagtcgcggcgactgcggc

SEQ ID NO: 3192 - DNA, 36 bp, synthetic construct
  source 1..36: mol_type = other DNA
ggcgcacacggcgcgatttcagacagcatgaggcgg

SEQ ID NO: 3193 - DNA, 36 bp, synthetic construct; identical to SEQ ID NO: 1708
  source 1..36: mol_type = other DNA

SEQ ID NO: 3194 - DNA, 36 bp, synthetic construct; identical to SEQ ID NO: 2895
  source 1..36: mol_type = other DNA

SEQ ID NO: 3195 - protein, 1049 aa, unidentified
  REGION 1..1049: note = Cas Enzyme sequence
MTAGYRVHFDRLRDIRSKATITRTHKFRCAVPAEGMPHLARRMRDTARIVDNAAEGSLLDLMIQLYGLGFLFCPNAAGKEVLWHLFDQPLPASSVMKQLHEALPPQLRAEIHDKIALYDFIMSPPRDIKEKIGDGSILPPNYLKRLAAIFTEDKVTRDNIENYPTIKNINDAFIAYAHEHEVIDIEGLQKIFGISRPVTINQDKSTFIVLPMDQEILAERCAHSIDIYTAYFEHLLPAAQQTNGARTIQSLAGVADNQNALSNLWGDALNAFRSSPNDAAIVITQGNPIFFEQNPEYLERLSAHIHELAQRISAGKTTDFLSTNWAKYRALVGGRLQAWLSNFENRLGDYEAHLVEDNEGNARKSAKTHRAIFDVIAQTRYAELFPQGQVTNFELLRNLQPRLAIALQRRDKNLGKLLDDYTEVLQDFREFLAKWSNEGIPVHGDGDNAVETTEALFGDAFRTLVDQKKKKKEAAESERDTDKRIIGFWKKSMIPSALERYPRFIKQAQRDPKQTIEAATDDLVKLVIAGQDLVTTARQRNPLSDEDRSRVHEEWFDEGRRENGRAHALKVLERLKDLALRMRNGAPVWAFLERYIDWNAVEAHEKSEDLKKWWRAKDRRFLRFLVTPYHRFQYTPMPIREDRLHDPETFLRDFSAAFGLDQLTNEQAVKDFFHLSNQQGNVFADGGELLKMYWGLQLRLLPREIQLPAERPQWQALRTRSLATLLYSNPQDGIIHGRAMPRAHFQRFVAAAIGAEIRGKLSLLSRTSYVDRIVLQVTNGEQSILEYIPLPWGQMHFAEKSDDELRQMTAPQRRRYRRAQKRLRKRPAQQKQLSAEAQGTLRAHDIEAADPQEVAAHIWQKLKTASVSDARALTRVLGELPHRWAMALRTKLPIENISPLSNGLFFEKSQKKSVIKPKHVPHASANGTIGGYYYYRFPLETSRVQKQFLERFLWGDRTEQLVESIQGGSIIYEQIQHVRHDADGVVQITPGKQTLYWALPFSIAKGDGDRHGEVIEETRCLEGTNICVHTADGKAQKQYRRERTLLGID

SEQ ID NO: 3196 - protein, 970 aa, unidentified
  REGION 1..970: note = Cas Enzyme sequence
MPQSSKRKKLQTRKQDFIQGYRLHRERIKKLADGKSSSVRSIKFPLVTKNKDIFNEFFEAIKHDYKYIVGDMNFADWKANDIETSSLLLLWKTAIQSGVVIARANDVASKFYSILNAPCEVANSQDSFAEFNNDTSLKLSISGLEKSLFVGQRKGMTFEGLIVLFYQSCENYIQLDKKQQSLVKSLSDIPEEIRLSLQSVIKPVWDTNSLKLPPEKVFNQTKKDLITKYNLDMNKPNSIGRTFFSIPSLKTNSLEESLDLFALQLTNLNHRTGYDEKDILGGLESNFEGLSSFFGSIDPQKSLSNDLPIAVTNIVNALIENPSRLVKPADYRSQVGGMLSSYVTNHFKRRSELQDDLEDSKSSKINLKANLQKLEDFLEKESNQNSIDLKTFDKEACIKSISELKQWFTHYQEITSDEIFNILEFELSNLKSSVNKIVFVADDLHNVQPKKPKKNNLNKKDELNGLLGKLQVAKPVHFPGESKKAQFIKFYFAHEIFSRLLDFYRKHCDIGFEVTCIKEEQEVSVKLRKVLDVLWSKYPEFSTRFQNILKSLFSKIISISESSQKEIAAKFENDTFDLDHFLCSYELDSMRAWRFYSNPRARQKSSEISINTASLEGLQRLYEQLKPNWADIIAASENDFNSRFEDLVSAIEIEKIRSGIRHFLAGDNYFIYSKPYHQTFPVSSFSRDQYIDLKLFDELLKDSRPITDKVEQILLTTLRAKLTSISRKEELARYVVNPLLTEEKFPLVFRKLNEEEINGIKKHSNGKHRSGFRDYAFSLSLDKWLGISPPKNDNSSICYQKSSKSFEKLKKVGGSQVIDIQSSVYQTQFLERLAERSIFGSKTRDWEGLELSLSSYSFIAEETHTITWVKGESGFRYPQLGLVKDSRKIFVSMPFGLEVSNPSTNFLSSANRYLGIDVGEYGLAYNVIEVSGDESKNYAKELNIVPSDDIKISCIASGFIHSHLIHKIKD

SEQ ID NO: 3197 - protein, 1254 aa, unidentified
  REGION 1..1254: note = Cas Enzyme sequence
MKLTEKSRRAKLKLKKQSEIKQGYRLHIERLKLNSTGEKEYEFTRSFKFPIDIDLNAHEQIFLDIANDYKALVGNFNFSDWLSDKRNNFSSRPSLLKFWQEALRRNILIVKDKSEAKKLTDVIEGISDTQLNDAFLLFQQDLLKEGYSEVLKTSRQKFQDFISIDPKKSRSLDYISKYLLNDLLFKEIKNKTIREESYKQQADLVKKFLVKKFNIRIDELGIQDIRQFRSELALEYFKKDLSILKGNNENENTFLKISKEGLKRLLPAFNWEDDGQDFNKLLYAYHSLAKKLYREEQETSNPKKKENDKILEAITGLANNQSGLSNFFIEAFKSKGANGENNLFDLPIQGLVFKLASAADYRTQVGGILSSYTTSLIKRRDELKEAKSTFNEVLKKIKIIIGEVNAKHLVDLFLILERSAENYIQNVNEATYELLLLDLAELKSQLNELTLEEKPSSEKQPEQSKKKSKSKEEKSKKDLLNEEFPKLNLDRPIRFPGYAKEEQFKKFYYAYEIFMRLINFYRDLILPVGQNLLVKEDLHDSIVEEKFRDVLQTLAYFYENASTRFRHLLIKYYRDTLDLETVLRSNEINLTTEEFLKNYRSSFKKFYVSKFSKAHYQQLVFPEDFDFRSNLEQLFNNLSIKWDSVLDGSEKDIESRLEDLVSAVEIEKMRSGIYFFYYKLSQENQSVIDKYKNVFSNLDRDEYLDLKTFDALIKYSSSELSFQRRFLNVLFTTLRAKLSMISRKEELVRYVLNPIKSEEKFKLFAISHEEKGLAFSLALPKESRNSDQILENTKYFVYKKASKEKDGSKGKSGFKENKSRTKLSSMFPLKSSKYQIQFLYRAFEKSFNEKGLDNYNGVSLEIASWSLIAEQKFNIKWEKLTENNAYSYPALTASEDFDSRRVYVSMPFTFTSSAGKESILRNNFIGFDVGEYGIAYVVIEKRELAEVSSLEDFTVKDSGFIHSHLIRKIKDHYRENQKIQRSATFSRPNSKLALIRENAIGSLRNRLHHLVVKYQAKPIYEWQISNFETKSNRVTKIYNSVKRSDPYKSAVEDALRKHVWGDKSSIGAEVNAYATSYTCSCCARSPYSINKDQSYKLTHLREDRYLIKNTDMADSGDGDKFEANLFLKFENHEIDGKELLKALKNWARPPIEVVNKILNLTPDQSEELVSLRGNSFIYRCPFCNSITDADIQAALNIAILGSLKKVNKDDQGDSKKDYDQLISLLQSSKNSESGKVLLATFLEKGLDFNSYISA

SEQ ID NO: 3198 - protein, 1369 aa, unidentified
  REGION 1..1369: note = Cas Enzyme sequence
MIQEINSSTKSQEKTKQYERAGYRVHFDRLRDSYNDVSSIRTHKFKCQILNQATEENGEANQNLNKIQHEINQKLDKLGKVVDSSEDGSLLNFLIQLYGLGFLFVSKPAKRKSLLDRLSNIDIKESDINYDNCELKNYIRDEEALYEFLTSQPRNVKENIKDNFLPNSMIGNIGRIFEQDKKIDSKNLNEFPIVKKVHDDLLEIVLKIDLEKKKINQKDFQNYFKIIIEDDELPEATFVVQKITEEEIKRNIDNPIDIYTAYFRYLNPIAQKHKIEVQSLCGVADNQNALSKLFNSNLQDFQKDLESCEKLIASGNCEYFQENPNILNLIAKRVHFLAKEIGNINEIDFINNNFAEYRGLIGGRLQGWLSNFISRIKKFEDNLKTDGDHHKIFEKINKFCDWKNIFPSQQKINFEKLIELRKEAYESLLQIMEQQKTDSNNRDFGEIIFEYNRYLQEFREYLMKFNNEGIPEIIFQDGNEKILKIVSINNKDADKILIGEYEISKDLFEKESKKKSRKDSQDEENDNEKSEIETDKKIIGYWSLSLVPSELDNYPRFIGQAQKNPQQEIKKARDNLFKLIFQSLEFAKKVREINNKKTNFNAEIWSKEIKNNKKISDFGLFHKNLETLKELASCHKGGEAKKSKTYKFLEKFVDEKNNIDLREKFKDGKLHDVKFFLSGYEKQTHQYLTTTPTPDFEDYLLQFEQHFGLKNLENEEQIKRFLNVQDGNFSFDTLERGEVLKIYLSLLLRDLEGDFQRKEINLPQDINCDQLLETSLQSLIFNKHNQLKKSEKIDAVRRFVASSLSSEIRSKLGILSRKDYIKRNVIQTTNGNQNFIRYVPINWGDFDRFNESEEPLKIKGKRNKLTQKKRKKIRENAKKEFSSEAKEILKNLKIFGSDEIFSNQNNQNIAEQIWKIFPKKSAQDQQKLARVLAEMPHRFEMVLICKSKIESLEESSFKISSGLFIGKSNNKEIFDFFREANGYNLYSFPIQTSVYQKQFLERFLWGDRGDENQQNKLEEKMLGGSLIFERIVDIKNNFAEKDHCFYYAIPFQFEKKSSEKVEKTLGKKRFRHSTISKSKPNILGIDLGEYGFGYAIFDQEKLYFKEKGFIKIPLLENMRDKAKSWKDNQASGIFSRPTTHLADIREQTAGQIRNQIHHLAIKHQAIPVYEDSVDGFETGGQRISKLYKTLKTADIIRKSTKADEAVRKHIWGNIYNGIGAEIGSSYTSQTCRECGISESYEVRQKYNETKKNKNKGEEEYLKKELLRIEKDQRMEMPRDIALKEGKRGQKAWFKCQNCGHEVDADAQAAKNIALKYFFKEDISDEDKIKYSVEVKDKKLDEATSKEVKTRIDTLKLFIDKSKEFKENKI

SEQ ID NO: 3199 - protein, 1200 aa, unidentified
NKNLLLKKDKQRAENYEKVKCYIDRFHKEYIESVLSKARIEKVNEYANLYWKSNKDDSDIKAMESLENDMRKQISKQLTSTEIYKKRLFGKELICEDLPSFLTDKDERETVECFRSFTTYFKGFNTNRENMYSSDGKSTAIAYRCINDNLPRFLDNVKSFQKVFDNLSDETITKLNTDLYNIFGRNIEDIFSVDYFEFVLTQSGIEIYNSMIGGYTCSDKTKIQGLNECINLYNQQVAKNEKSKKLPLMKPLYKQILSEKDSVSFIPEKFNSDNEVLHAIDDYYTGHIGDFDLLTELLQSLNTYNANGIFVKSGVAITDISNGAFNSWNVLRSAWNEKYEALHPVTSKTKIDKYIEKQDKIYKAIKSFSLFELQSLGNENGNEITDWYISSINESNSKIKEAYLQAQKLLNSDYEKSYNKRLYKNEKATELVKNLLDAIKEFQKLIKPLNGTGKEENKDELFYGKFTSYYDSIADIDRLYDKVRNYITQKPYSKDKIKLNFDNPQLLGGWDKNKESDYRTVLLHKDGLYYLAVMDKSHSKAFVDAPEITSDDKDYYEKMEYKLLPGPNKMLPKVFFASKNIDTFQPSDRILDIRKRESFKKGATFNKAECHEFIDYFKDSIKKHDDWSQFGFKFSPTESYNDISEFYREISDQGYSVRFNKISKNYIDGLVNNGYIYLFQIYNKDFSKYSKGTPNLHTLYFKMLFDERNLSNVVYKLNGEAEMFYREASIGDKEKITHYANQPIKNKNPDNEKKESVFEYDIVKDKRFTKRQFSLHLPITINFKAHGQEFLNYDVRKAVKYKDDNYVIGIDRGERNLIYISVINSNGEIVEQMSLNEIISDNGHKVDYQKLLDTKEKERDKARKNWTSVENIKELKEGYISQVVHKICELVIKYDAVIAMEDLNFGFKRGRFPVEKQVYQKFENMLISKLNLLIDKKAEPTEDGGLLRAYQLTNKFDGVNKAKQNGIIFYVPAWDTSKIDPATGFVNLLKPKCNTSVPEAKKLFETIDDIKYNANTDMFEFYIDYSKFPRCNSDFKKSWTVCTNSSRILTFRNKEKNNKWDNKQIVLTDEFKSLFNEFGIDYKGNLKDSILSISNADFYRRLIKLLSLTLQMRNSITGSTLPEDDYLISPVANKSGEFYDSRNYKGTNAALPCDADANGAYNIARKALWAINVLKDTPDDMLNKAKLSITNAEWLEYTQK

SEQ ID NO: 3200 - protein, 1290 aa, unidentified
MNSIKNEYQLSKTLRFGLTKKKKLLKDDCNEIIYESHTELKELVLISEKKIMESVYINQKAKLDLSVDQIDTCLSSIKNFIDSWKGIYPRADQIAIDKDYYKILCKKITFDGFWIDEKTKTKKPQSRTILLSELSKKDASGKERKQHILDYWKNNIFSAIEKYEVVSRELKQFQKALKIQRTDNKPNEVELRKLFLSLANIILDILKPLVNGQICFPKIEKLDISKTDNKNLIDFATNHKFQSDLLNEIAELQHYFEENGSNVPFCRASLNPKTIIKSKLSTDNNIDKEIKQLGLDRILNEYLSAPYFDNSIIHLSAKEKLNKIEDKKENYITRGLLFKYKPIQIMLHHEIAKTLSKEIGKSEENIIEFLGNIGQIKSPAKDYEVSKEDFNINNYPLKVAFDFAWENVARNLYHTDTHAPIDECRKFLADNFDIKIEDNNLKLYANLLELNALLSTLKYGKPKDETSIKQNIKDLLNKISWNEIGKSGQKNKTNIENWLNNKDKIDNQNGIENAKKQIGLFRGSLKNKVPKYYKLTETYKDISMKMGKIFATMRDKITDEAELNKVSHYAMIVEDDNKDKYILLQEFTDKKEECIYSKTQTHNSDFTTYSVNSITSSAIAKMIRKVKAEELRKNQYNKDTFSIEETKEEKENRIIKEWKQFLKDKQWDYEFNLDTKNKNFEELKKEIDSKCYKLNISYIDKKTITDLVENKNCLLLPIINQDLSKEEKTQNNQFTKDWDAIFSQNTPWRLTPEFRISYRKPTPNYPISDKGDKRYSRFQMIGHFLCDYIPQSNTYISNREQIANYKDNEKQEQAVQCFHDKLLGKTEKEAKNEKLIALQAKFGSISRTNITQEKKKEKFYVFGIDRGQKELATLCVIDQDKKIIDDFDIYTRSFNSKTKQWDHTFLEKRAIMDLSNLRVETTISIDGKTEKKKVLVDLSKVKVKDKQGHYSKPDKMQIKMQQLAYIRKLQFQIQTNPDVVLAWYSDNNTQDLILENFVRKDDNDNKGLVSFYGAAVEELKDTLPIEEILNMLKQFKELKEKEKAGENVKYEIDRLIQLEPVDNLKTGVVANMVGVIAFLLEKFNYQVYISLEDLSQPFDNKINGGITGVPIKTNKESGRMADVEKYAGLGLYNFFEMQLLKKLFRIQQKSTTILHLVPAFRAQKNYDHVTVGQDNIKGQFGIVFFVNANATSKTCPICGANNSEKPDKNKYPNAHKELAKDGKEVWIERDKSNGNDIIRCFVCGFDTTKTYEDNPAKFIKSGDDNAAYLISVSAIKAYELATILAIEKYK

SEQ ID NO: 3201 - protein, 1232 aa, unidentified
MLHAFTNQYQLSKTLRFGATLKEDEKKCKSHEELKGFVDISYENMKSSATIAESLNENELVKKCERCYSEIVKFHNAWEKIYYRTDQIAVYKDFYRQLSRKARFDAGKQNSQLITLASLCGMYQGAKLSRYITNYWKDNITRQKSFLKDFSQQLHQYTRALEKSDKAHTKPNLINFNKTFMVLANLVNEIVIPLSNGAISFPNISKLEDGEESHLIEFALNDYSQLSELIGELKDAIATNGGYTPFAKVTLNHYTAEQKPHVFKNDIDAKIRELKLIGLVETLKGKSSEQIEEYFSNLDKFSTYNDRNQSVIVRTQCFKYKPIPFLVKHQLAKYISEPNGWDEDAVAKVLDAVGAIRSPAHDYANNQEGFDLNHYPIKVAFDYAWEQLANSLYTTVTFPQEMCEKYLNSIYGCEVSKEPVFKFYADLLYIRKNLAVLEHKNNLPSNQEEFICKINNTFENIVLPYKISQFETYKKDILAWINDGHDHKKYTDAKQQLGFIRGGLKGRIKAEEVSQKDKYGKIKSYYENPYTKLTNEFKQISSTYGKTFAELRDKFKEKNEITKITHFGIIIEDKNRDRYLLASELKHEQINHVSTILNKLDKSSEFITYQVKSLTSKTLIKLIKNHTTKKGAISPYADFHTSKTGFNKNEIEKNWDNYKREQVLVEYVKDCLTDSTMAKNQNWAEFGWNFEKCNSYEDIEHEIDQKSYLLQSDTISKQSIASLVEGGCLLLPIINQDITSKERKDKNQFSKDWNHIFEGSKEFRLHPEFAVSYRTPIEGYPVQKRYGRLQFVCAFNAHIVPQNGEFINLKKQIENFNDEDVQKRNVTEFNKKVNHALSDKEYVVIGIDRGLKQLATLCVLDKRGKILGDFEIYKKEFVRAEKRSESHWEHTQAETRHILDLSNLRVETTIEGKKVLVDQSLTLVKKNRDTPDEEATEENKQKIKLKQLSYIRKLQHKMQTNEQDVLDLINNEPSDEEFKKRIEGLISSFGEGQKYADLPINTMREMISDLQGVIARGNNQTEKNKIIELDAADNLKQGIVANMIGIVNYIFAKYSYKAYISLEDLSRAYGGAKSGYDGRYLPSTSQDEDVDFKEQQNQMLAGLGTYQFFEMQLLKKLQKIQSDNTVLRFVPAFRSADNYRNILRLEETKYKSKPFGVVHFIDPKFTSKKCPVCSKTNVYRDKDDILVCKECGFRSDSQLKERENNIHYIHNGDDNGAYHIALKSVENLIQMK

SEQ ID NO: 3202 - protein, 1276 aa, unidentified
MKSFENSCQISKTLRFGATLKEDKKKCKSHEELQEFVDISYKTMKSSATIAESLNEIELVKKCERCYSEIIKFHEAWGQIYCRTDQIAVYKDFYRQLARKARFDVGDQNSQLITLSSLSSKHNVYQGLKRSQHITNYWKDNIARQKSFLKDFSQQLHQYKRALENSDKAHTKPNLINFNKTFSILANLVNEIVIPLSNGAISFPNISKLEDGEESRHLIEFALNDYSDLVGSIGELKDAIATNGGYTPFAKVTLNHYTAEQKPHVFKNDIDAKIRELKLIELVEKLKNKTSKQIEEYFSKFDKFKIYDDRNQSVIIRTQCFKYKPIPFLVKHELAKYIAEDEDAVLKVLDAIGATRSPAHDYAHNEDVFDLKHYPIKVAFDYAWEQLANGVYTTVSFPEEKCREYLNAIYGCEVTKEPVFKFYADLLYIRKNLAVLEHKNNLPSNPEEFICKIENTFEKIVLPYKIKEFETYKKAILTWINDGRGHEKYTDSKRELGLIRGGLKGRIGAQKMFRKNKKGELIPYYENPYTKLTNEFKNISSSYGKTFAELRDKFKEKSEITKITHFGIIIEDNNKDRYLLANGLQHDNTDQSNTQVEAILGKLNTSLEFTTYQVKSLTSKILIKLIKNHTTSPNAKSPYADFHTSKIHVDWTKIKKEWDTYKSNHSLLQYVKDCLTNSTMAKNQNWAEFGWDLESCNSYEAIEHEIDQKSYILQKHTISKASIKSLVENGCLLLPIVNQDITSQGRKDKNQFSKDWKQIFEDSKEYRLHPEFAVSYRTPIKDYPKDKRYGRLQFICAFNCEIIPQNGEFINLKKQIENFNDEDIQKNNVAEFNNKVNEALLGKEYVVIGIDRGLKQLATLCVLNKRGKILGDFEIYKKEFVRTENRSKNYWKHTLAETRHILDLSNLRVETTVEDNKVLVDQSLTLVKKNRDTPDEKATEENRQKIKLKQLSYIRKLQYAMQTNEQAVLDLLKDNSDDEEFKKRVEGVISPFGEGQEYADLPIDTMRAMIQDLQGVIAKGNKQTEKNKIIELDAADSLKQGVVANMIGVVNFILAKFNYEAYVSLEDLSRAYNVAKSGYDGRYLPSTSQDPDMDFKEQQNQMLAGLGTYQFFEIQLLKKLQKIQSNNTVLRFVPAFRSADNYRNIIKLNPKYDNTEYVHKPFGIVHFIDPKDTSSKCPVCGKTGKKNVDRNEKKNNILLCKACGFRTVWELKQPENIKSEGYCFSEDEIQKTIKNNQKQMEIKKLSDKNIHYIHNGDDNGAYHIALKSVENLKHKE

SEQ ID NO: 3203 - protein, 1306 aa, unidentified
MNNNFIEFRGLYEISKTLRFELKPVGETEKLIVENEVFPKDKIVYESYKKIRPFLDNLHTKFIEESLENLNLDFNNIEVSFLSWQKEIDKIQKDKLKKEIFGEKGKGGLFGKLRKDVNNKFITNGENWKKIYENKVSIDEKGKEKNYKIKGDGYKILLSDTNLDILSEIYTEENFGEKVIIEKYIKNPNYTELNGEKKFILEKQNLFKSFKGFTTYFTNFNHSRENFYKDDGKSGRIATRIIDENLVFYLKNKKNFDEKYKENEKIILGFKEKLNNFGEKIDEFFSLDFYNKCYTGKQIEYYNQLIGELNSVINQEKQASFSLYTQNKKINENIKFNKYDFPIFKELYKQILSEKTTEQKFIEINNFEDIKIHLKELEEKNKEKNKIVQNLIKSISEKYQDYDFEKIYISKLSLNTISAKFFGSDKWHFIQEILEKEIGKKNKNGKLDLPDFIKLSDIKNVLEGFNKILLEDKCNKEEIYKEEFYSIEENNVFVKFLKIFEKEFINLIEGKKNNKGEYEIIGYNKSLKDLQENILNLSDFSEVKEEKEKQIEYIKSYLDSSLNIFRMMKYFALEKGKESVEAEYETEDIFYNEFKKFYTDNEIISYYNEFRNYLTKKAYSTNKIKLNFENGTLVDGWDKNKEPDNFGTLLKKNGKYFLALQVYGKKNIFYKKKGSGVEDIKEAFNINSGEDFYEKMDYKFLPDPKKMLPKVFFAKGNIDIFNPSKEILEIKENETFKTGDKFNLDDFYKIVDFYKESILKYPDWQIFDFNFSDTKTYKNLADFYREVELGSYNLSFKKVSQKYIFDNLKKGNIYLFEIYNKDFAENKTGKENLHTMYFKGLFEENNLQNVVLKLNGQAEIFRREASLKEKIDKERKTKIDIIENKRYTQDKIFFHCPIKLNFAKHNTRINQEILKYISNNKEINIIGIDRGEKHLAYYSVIDRNGNILKDKNGNLVKGSLNIVGNNQNYHDKLETREKERQEARGSWKTIGNIKDLKDGYISQVVHKLAELIINLNAIIVFEDLNSGFKRGRQKIERQVYQKLEKALIEKLNYLTFKDKNLGENGHYLSAYQLTEQFETFEKVGKQTGVIFYTDPSYTSSTCPACGFRKDLYLKYSNLKNALGDIEKIDSIIFDGKKFIFEYNNKKVFTDRDRKRNVSSEESGVKGWKTIDNYITKNLENLFNKFDINYTTGNNLILNIQEKNEKDLYKGVFDNFNAILSIRNATIKDNSRTGDFICCPCCDFDSRKENAIGIENGDDNGAYNIARKGIIILNKIDKALEDKKEISKIKWEYMIVKQIDWDNFTQK

SEQ ID NO: 3204 - protein, 1195 aa, unidentified
MNKKGFEKFVNLYELSKTLRFELKEVGETLNNLEKDSIIQKDKEVEENYNKIKVFFDSLHREFVKQSLENGYLNEIENFYNSYIELNKTQENKKNKTLQKEFEKASKSLKKELVSFFESKGNEWKQKYSFLKKGGIDVLNEKEVLDLMGELYPEQKELFKKFDKFFTYFSNFKESRKNFYADDGRAGAVATRAIDENLITFIKNIEDFKKFQNNFSDFIGQIFREEEKQIFELDFYSSCLLQDGIDNYNKILGGYSLENGEKIQGINEKINLFKQNQTHSNSKDIKFPRFKLLYKQILSKKEKVFFIDEIENDERLVDFIKISLEKNKSKIIEAEKIINNFIKSNSSFELEKIYLSKVSINTISNKFFTSWDYILKEGFEKGEMKDFVSFLEVKNAFEKIKYEKLEDIFKANYVLENIVLDGESLYNNFLNIFFNEFQKNISEINLYISKIEKLLLEKFEKTEVQVEIIKNYFDSVLSLYKMTKYFALEKGKSKVDLETDNNFYNDFFVYYEDFEIWKGYNLVRNFITKKQVKTDKFKLNFNNSQFLIGWDKDKEKERLGIILKKEDKFYLGVFKNNKIFNNYKYESGDFYEKMNYKQLNNVYRQLPRLAFSNAKKEVYGITQELEKIKQEFDIFQKSKEKGEKFDPEKLKKLIDCYKKGFLSTYENEFDLEEIKNTDYTDLAKFYDDIEKKTYKLHFSRIDSDFIDEKVNSGDLYLFQIYNKDFSVSKKAGSKENIHTKYFKLLFDEKNLENLVIKLSGGAEIFFRDKTDNLKTKLDKSGKEVLAHRRYNQDKIMLHLSIILNANTGDNYGFNKMMNEYLNKNEDIKIIGIDRGEKHLAYYSVIDKTGKIYDIGSLNIVNGVNYIEKLEKIELGRKDARVSWGEIENIKELKNGYISQVVNKLAELIIKHNAIIVFEDLNQGFKRGRQKIEKQIYQKLELALANKLNYLTQKDKGDDEVLGNLKALQLVPKVNDYQDIANYKQSGIMFYTIANYTSTTCPCCGFRKNIYISNSDTKEKQKKVFEKVDIKFDGEKFIFSYEIEQDKKAKQKSNKTSFAVNSNFSRFKYNSKKMLVEDLNITEELKNLFKNIDLSGNINNKISEKDSYFYKSLTYYFNLILQLRNSDTKNNIDYIICPSCNYHSKDGFQKLDYNADANGAYNIARKGIILLDRIKNNLEKPDLYVSDTDWDNFTQK

SEQ ID NO: 3205 - protein, 1276 aa, unidentified
MKSFENSCQISKTLRFGATLKEDKKKCKSHEELQEFVDISYKTMKSSATIAESLNEIELVKKCERCYSEIIKFHEAWEQIYCRTDQIAVYKDFYRQLARKARFDVGDQNSQLITLSSLSSKHNVYQGLKRSQHITNYWKDNIARQKSFLKDFSQQLHQYKRALENSDKAHTKPNLINFNKTFSILANLVNEVVIPLSNGAISFPNISKLEDGEESRHLIEFALNDYSDLVGSIGELKDAIATNGGYTPFAKVTLNHYTAEQKPHVFKNDIDAKIRELKLIELVEKLKNKTSKQIEEYFSKFDKFKIYDDRNQSVIVRTQCFKYKPIPFLVKHELAKYIAEDEDAVLKVLDAIGATRSPAHDYAHNEDVFDLKHYPIKVAFDYAWEQLANGVYTTVSFPEEKCREYLNAIYGCEVTKEPVFKFYADLLYIRKNLAVLEHKNNLPSNPEEFICKIENTFEKIVLPYKIKEFETYKKAILTWINDGRGHEKYTDSKRELGLIRGGLKGRIGAQKMFRKNKKGELIPYYENLYTKLTNEFKNISSSYGKTFAELRDKFKEKSEITKITHFGIIIEDNNKDRYLLANGLQHDNTDQSNTQVEAILGKLNTSLEFTTYQVKSLTSKTLIKLIKNHTTSPNAKSPYADFHTSKIHVDWTKIKKEWDTYKSNHSLLQYVKDCLTNSTMAKNQNWAEFGWDLESCNSYEAIEHEIDQKSYILQKHTISKASIKSLVENGCLLLPIVNQDITSQGRKDKNQFSKDWKQIFEDSKEYRLHPEFAVSYRTPIKDYPKDKRYGRLQFICAFNCEIIPQNGEFINLKKQIENFNDEDIQKNNVAEFNNKVNEALLGKEYVVIGIDRGLKQLATLCVLNKRGKILGDFEIYKKEFVRTENRSKNYWKHTLAETRHILDLSNLRVETTVEDNKVLVDQSLTLVKKNRDTPDEKATEENRQKIKLKQLSYIRKLQYAMQTNEQAVLDLLKDNSDDEEFKKRVEGVISPFGEGQEYADLPIDTMRAMIQDLQGVIAKGNKQTEKNKIIELDAADSLKQGVVANMIGVVNFILAKFNYEAYVSLEDLSRAYNVAKSGYDGRYLPSTSQDPDMDFKEQQNQMLAGLGTYQFFEIQLLKKLQKIQSNNAVWRFVPAFRSADNYRNIIKLNPKYDNTEYVHKPFGIVHFIDPKDTSSKCPVCGKTGKKNVDRNEKKNNILLCKACAFRTVWEFKQPENIKNEKHCFSEDGIKKTAEDNNKKIKEKNLSDKNLHYIHNGDDNGAYHIALKSVENLKHKK

SEQ ID NO: 3206 - protein, 1247 aa, unidentified
MFKGDAFTGLYEVQKTLRFELVPIGLTQSYLENDWVIQKDKEVEENYGKIKAYFDLIHKEFVRQSLENAWLCQLDDFYEKYIELHNSLETRKDKNLAKQFEKVMKSLKKEFVSFFDAKWNEWKQKFSFLKKWWIDVLNEKEVLDLMAEFYPDEKELFDKFDKFFTYFSNFKESRKNFYADDGRAWAIATRAIDENLITFIKNIEDFKKLNSSFREFVNDNFSEEDKQIFEIDFYNNCLLQPWIDKYNKIVWWYSLENWEKVQWLNEKINNFKQNQNKSNSKDLKFPRMKLLYKQILGDKEKKVYIDEIRDDKNLIDLIDNSKRRNQIKIDNANDIINDFINNNAKFELDKIYLTRQSINTISSKYFSSWDYIRWYFWTGELQEFVSFYDLKETFWKIEYETLENIFKDCYVKGINTESQNNIVFETQGIYENFLNIFKFEFNQNISQISLLEWELDKIQNEDIKKNEKQVEVIKNYFDSVMSVYKMTKYFSLEKWKKRVELDTDNNFYNDFNEYLEGFEIWKDYNLVRNYITKKQVNTDKIKLNFDNSQFLTWWDKDKENERLGIILRREWKYYLWILKKWNTLNFGDYLQKEWEIFYEKMNYKQLNNVYRQLPRLLFPLTKKLNELKWDELKKYLSKYIQNFWYNEEIAQIKIEFDIFQESKEKWEKFDIDKLRKLIEYYKKWVLALYSDLYDLEFIKYKNYDDLSIFYSDVEKKMYNLNFTKIDKSLIDGKVKSWELYLFQIYNKDFSESKKEWSTENIHTKYFKLLFNEKNLQNLVVKLSWWADIFFRDKTENLKFKKDKNGQEILDHRRFSQDKIMFHISITLNANCWDKYWFNQYVNEYMNKERDIKIIWIDRWEKHLAYYCVIDKSWKIFNNEIWTLNELNWVNYLEKLEKIESSRKDSRISWWEIENIKELKNGYISQVINKLTELIVKYNAIIVFEDLNIWFKRWRQKIEKQIYQKLELALAKKLNYLTQKDKKDDEILWNLKALQLVPKVNDYQDIWNYKQSWIMFYVRANYTSVTCPNCWLRKNLYISNSATKENQKKSLNSIAIKYNDWKFSFSYEIDDKSWKQKQSLNKKKFIVYSDIERFVYSPLEKLTKVIDVNKKLLELFRDFNLSLDINKQIQEKDLDSVFFKSLTHLFNLILQLRNSDSKDNKDYISCPSCYYHSNNWLQWFEFNWDANWAYNIARKGIILLDRIRKNQEKPDLYVSDIDWDNFVQSNQFPNTIIPIQNIEKQVPLNIKI

SEQ ID NO: 3207 - protein, 1181 aa, unidentified
LKLVGETLNNLENDGVIQKDKDVEENYNKIKIFFDSLHREFVKQSLENGYLNLLEYFYNSYVELNKNPENKKNKSLQKEFEKSSKDLKKELVSFFESKGNEWKQKNTFLKKGGIDVLNEKEVLYLMGEFYPENKELFKKFDKFFTYFTNFKESRKNFYAEDGRAGAVATRAIDENLITFIKNLEDFKKFQNNFSDFVKKNFTEEEKQVFELDFYNSCLLQDGIDIYNKILGGFSEENGNKIQGINEKINLFKQNQNKSNSKDIKFPRFKLLYKQILSEKEKVAFIDEIENDEKLLEFIKQSLEKNKSKIIEAEKIIENLINNNPSFELDKIYLSKVSINCISSKYFASWDYILKEGFEKGEINDFISFEDLKNAFEKIKYENLDDIFKNNYTKENIVLSGESIYQNFLNIFLYEFKQNNSEINKYISELEKLFSEKFEKTEKQVEIIKNYFDSVLSLYKMTKYFALEKGKKKIDDLDTDNNFYNDFFLYYEDFEIWKDYNRVRNYLTKKQVKTDKFKLNFNNSQFLTGWDKDKEKERLGIILKKDEKYYLGILKNNKILDNYKFESGDYYEKMSYKQLNNVYRQLPRFAFSNSKREVYGITPELEKIKEEFDIFQKNKEKGEKFDIEKLNKLINCYKKGFIETYKNEFDLEKIKNTNYSDLAKFYDDIEQKTYKIDFTKISSNFIKEIIKSGDLYLFQIYNKDFSETKKVGSKENIHTKYFKLLFDEKNLENLVIKLSGGAEIFFRDKTEKLKTKLDKSGKEILDHRRYSQDKIMLHLSITLNANRGDNYGFNKIINEYLNKNEDIKIIGVDRGEKHLAYYSVIDKSGKIEEIDTLNIIKSSDGKITNYLEKLEKIEESRKNARVSWGEIENIKELKNGYISQVVNKLAELIIKHNAIIVFEDLNIGFKRGRQKIEKQIYQKLELALAKKLNYLTQKDKKNDEVLGNLRALQLVPKVNDYQDIIKYNKNQSGIMFYTRANYTSTTCPCCGFRKNIYISNSDTKEKQKKAFEKIKIIFDGNKFIFSYEIEQDKKAKQKSNKTSFVINSNFSRFKYNSKKMLVEEIDINSELKKLFTNINLIGNINEQILNSDSYFYKSLTYYFNLILQLRNSDSKNDIDYIICPSCNYHSKDGFQGLDYNADANGAYNIARKGIIMLNRIEKNSEKPDLYVSDIDWDNFTQK

SEQ ID NO: 3208 - protein, 1160 aa, unidentified
MSSLLSEFTSLYGLSKTLRFELKPVGKTKEYLSKDDFFKEDTSKADSYSLMKQLLDGLHRDYINEALAKVTKLSIDLEPDYIELRKEIASYFTNSKLLGEKDTINQLLQRYPEHKIHIEQFQGFRGYFKTYKQNRENLYKNEGKAGQIATRLIDENLPRFLKNKQIIESSLLKLSDFSVIEKNEKQEQKSKLIKDYSVFFDIGNYYYYLTQASIDAYNQTVGHFNHSINLYKQQNGAVKIPLLQLLYKLPLAPKEAVHWLPQQLENDEQLLQTIQSVKSSIDTSILPFIQTILQPTLSSDNNYDRHGIYISLKTLEHRGGIGLTGWSSFREMTHDLSKAGDDPKLKKEYKDFPFVSLQQVKDYLDEKQKGGIEHTAIFGEGKAKDIGLKSYNTYFFELVASAVHEIIVSYQDAKQNYEQGLTKDNQKKLMDTSLSLRRLLGGFILVHKKVRLNPNIKESYFYDGEKGLDAAIFDDNDDPIHTSYDKVRNYLTKKPYSNDDKIKVNFENPTLLDGRDQNKERNNSGILLRKNGLYYLAILKKGHNIFFDEKRNNKLYDGSGYEKLIYKLLPGPNKMFPKVIFSKKNIDFFSPPKEIIRIRSQESFKQGEGFSLKDLHTWIDFLKDALGKYEGWKCYDFNFKKTSEYQKINEFYQQVESQGYSMKWKNIDEDMCDQEIEKGNLYLFQIHNKDFGMNSSGNSNLHTKYFLALFAGGDNNLFKLNGEAEIFWRKATLERQTKGKSPKHQVEIIEKRRYTEDKLMLHIPITLNFCRNETKFNDLMKKTIKEKVHGVTILGIDRGEKHLLYYSLMKQDGTIIKTGSRNVIANKIKQVDYHQKLEEREIKRDEAQLNRDQQEQIKDLKSGYISQVIHEISKIVIDHNAIIVLEDLNSGFKRGRQKVEKNVYQQFELALAKKLNYLVFKKTPDNQAGGTMKGYQLTPPVAGFKDLSFQTGIIFYTPAGYTSTTCPSCGWRKNLYLKYQNEKSAKEELKKISMSKTNDYYTITYTVPQDTTKGKSDTVLNKTQRTLTSKNQHRNQYNRTTKQDLPHDITGWLNTLFDQGNFDYASWLGQASVTQCKTLIRVLNLLMKIRNAKTGTEIDIIQCPACGFHSNQGFQGHQYNGDANGAYNIARKGAIILKKISDEEKSTIVRQFECDNERSK

SEQ ID NO: 3209 - protein, 1017 aa, unidentified
NIFEKNNLDFLNNSLKEKFEEYKEIFVIENYNNFLTQEKIDFYNEKIGELNSSELLNHLIQEIKNYNKENSIKIYIPKKLLTLDKQILSGESEENKFEKIENKEEFFEKWNKFFIESDKNILKLKDFFEAFFDELLEGNTFNSKLIFLRDKAIKDFSGIFFNDYNFLTGGLKIKEISEKEFSLDKILKFLDKIKDEAEDIFKKHYLEKISNYKGKSIKEIFIEILKSYFLNFIKDFEEIKNKIDLEKIEKNLFKNGEDKKDKDSVGQIYDFSSITRKIYSFISNFYPLKKEGKYYVEKKLEEKDLFFYGELDNFYHNSNVILYFNQFRNFLTRKSYNTGKIILDFNIEGWPETKGTFPNGGIILKKDGKILLGLLTSSKSRKFFTKENFKKYDGKGEYYEFMEYLVSDWAKVILLQFFKKYGEKYKEKYKIEKGALSELKKLNLTEKQEFEIVQDLISLVEIYVLEKFPKIGEIVGNKQNYKKIDDLERGFKNTLTYNLKFKKINANYVDNLEDLLIFEIYSKDFSGSSNGTMNLNSLYFLGLFNEENLEILSGNKKGSIFKLEGGGQIFFREKSLGKTKEKRTKKDDFHEITSKKRYTENKLIFHFPTKINFTNGYIKYSDFNEKFNKNFIEKNDDIKYLGIDRGEKNLIYISLIDKDGKIIKGKTYSLNGDKTEKYPDGVYKGKLREKQQEMMKSRKTWQEIGTIKELKEGYVSWVVKEIVDLAVKENAVIILEKLFSGFKNSRKKIDRQIYDKFEKALIKKLNYYFKKSDKNGIRNGIQLTPYFYDQNLKDSIIDNAKQLGILFYVPASYTSQSCPNCGFIKNGFYIKDKKFFEKNIKEIRYNSLKNTFELEYISGEIFYTNIKRLKKERKNNERIWKTISYDITEELNKFFKENDINEYLKENILNLKKTKFKEFLTIINKIFQLRNSNTENESLETGKDLDFIACPKCLYNSNKKESITFGKNRNIEELKDADANGAYHIARKGKIMIEKIKNKEEKIWPDLEEFKNEIQKI

SEQ ID NO: 3210 - protein, 1233 aa, unidentified
MSRSIFSPFTNLYPIQKTLRRELKPLNENFQHDPALSALRNSEIPQRDEQREKDYQAIKPLLDELHNQFITESLQSLETQDRSDFVLFYQTYQKKKKNKAALSEKDLKTLDEEFESRTKALRTAIGNSYAKLAELRKSNPDYVNEKGKPFLNQKSYKILTEAGVLGLLEKKYASDPEKLALIRRFGNFFTYFTGFNQNRENYYSTEEKSTAVAYRAINENLLTFANNCELFEKLSVLSLSELEKKIFNPDSYSDYLVQEEIQDYNAQIASIKSKINLYSGAHKTKLPQPKLLYKQIGSPRGNTIPFDLITSEAEFQKMLHTMIRETDQRIPEFNKLFEQIFEEKADLSQIFLSKTALNIISNRYFSSWHTLLEKGVELKLFKFKKNDEERFQLPAYLSLAELKELLEAVPFQAAEKADAAEGKHHQVSLLKLQRENLHLENSHSNWELLLKSMKADFESFWTGEGEFGSYTSAKNALQSLSSLQSNNQEHKNLIKMLLDNALYAYRMLKWFKVDTSKLGFVPEGEFYPSLDQLLQDYPLPKWYDMIRNYLTRKPYSQAKLKLNFDCSTLLNGRDKNKETQNLSVILRKDGKFYLAIMKKDQNKFFEKSALYEGNLGTMEKMDYKLLPGANKMLPKCLMPGSDKKKYGASDQVLELYAKGSFKKSEKSFNLTDLHTLIDFYKSALPKYEDWKVFNFQFQATENYQDISQFYREVEQQGYLLNWRKVNEELIKQGIKDGSLFLFQISSKDFEGKSKTPDLQTLYWQQLFESPTNVKLNGEAEIFFRPGSMKKEKKTLTVDNYDVFKHKRYTEDKILFHVPITLGFGNNEVSPSAPSKFNQKLNQELIIPHFDDLHVIGVDRGEKHLAFYSVVSVKTGKIVKQGTLNLLNGTDYEAKLSQKAENRLYARQNRDTIEKIADLKTGYISQVVNKLVELVLEYNAVIVFEDLNAGFKRSRQKIEQSVYQKLELALAKKLNFIVKKEKAVGEPGSVTSAYQLAPQINTFGDIKGKQRGIMLYTRANYTSVTDPLTGWRKQHYFKKGSSEEMKAQFFKSFKNLTRDASQEAYIFDDGTWKLYSNVERRRGKRGDHRERTQIKYDPSLELDTLFSKYQIEKSDSLFDQLKNRELPQTFWTSFFRILDLIMQIRNTDDEGRDIILSPIGNPQERFDSRKRYDQLPRDENGLVIEESVFEYPTSGDANGAYNIARKGVMMLERIKEKPEKPDLLIRDAEWDSWV

SEQ ID NO: 3211 - protein, 1236 aa, unidentified
MKSDLFSPFTNLYPIQKTLRRELKPLNENFQHDLALSALRNSEIPQRDQQREKDYQAIKPLLDELHNQFITESLQSLEPQHRSDFVLFYQTYQKKKKNKADLPEKELKSLDEEFESRTKALRAAIGTSFSATAELRKSNPDYVNEKGKPFLDQKSYKILTESGVLGLLEKKYTSDPEKLALIRRFGNFFTYFTGFNQNRENYYATDEKSTAVAYRAINENLLTFANNCELFEKLAVLSLSELEKKVFNPDFYSEYLTQSGVDFYNEMLGNIRSKANLYTQEHKTKLPQPKLLYKQIGSPRGNTIPFDLINNDEEFKKMLHMMIAETDQRIPEFNRLLEPIFEGKADLSQVFLSKTSLNIISNRYFSSWHTLLEKGVELKLFKFKKNDEESFKLPAYLSLAELKELLEAVPFQTVEKSDTAEGTHHQVSLLKLQRENLHLESSHSNWELLLKSMKSDFESFWTGEGEFGSYTSAKNTLLSLSTLESTNQEHKNLIKMLLDNVLYAYRMLKWFKIDTSKLGFVPEGEFYLSLDQLLQDYPLPKWYDMIRNYLTRKPYSQAKLKLNFDCSTVLNGRDKNKETQNLSVILRKDGKFYLAIMKKDQNKFFEKSALYEGNLGTMEKMDYKLLPGANKMLPKCLMPGSDKKKYGASDQVLELYAKGSFKKSEKSFNLPDLHTLIDFYKSALPKYEDWKVFNFQFQATENYQDISQFYREVEQQGYLLNWRKVNEELIKQGIKDGTLFLFQISSKDFEGKSKTPDLQTLYWQQLFKNQTNVKLDGEAEIFFRPGSMKKEKKTLKVDNYDVFKHKRYTEDKILFHVPITLGFGNNEVSPSAPSKFNQKLNQELIIPYFDDLHVIGVDRGEKHLAFYSVVSVKTGKIVKQGTLNLLNGTDYEAKLSQKAENRLHARQNRDTIEKIADLKNGYISQVVNKLVELVLEYNAVIVFEDLNAGFKRGRQKIEQSVYQKLELALAKKLNFIVKKEKAVGEPGSVTSAYQLAPQINTFGDIKGKQRGIMLYTRANYTSVTDPLTGRRKHYYFKKGSSEEMKAQFFKSFKNLTRDASQEAYIFDDGTWQLYSNVERRRGKRGDHRERMQIKYDPSLELDTLFSKYQIEKSEALLDQLKNRELPQTFWTSFFRILDLIMQIRNTDDEGRDIILSPIGNAEERFDSRKRYDQLPYDENRVVIEESTFEYPTSGDANGAYNIARKGVMMLERIKENPEKPDLLIRDAEWDSWVGNF

SEQ ID NO: 3212 - protein, 1234 aa, unidentified
MKSDFFAPFTNLYPIQKTLRRELKPLNENFEHDPSLSSLRNSEIPQRDEQREKDYQAIKPLLDELHNQFITESLQSLETQDRSDFVLFYQTYQKKKKNKADFSEKELKSLDEEFESRTKASRTAIGNSYAKLAELRKSNPDYVNEKGKPFLDQKSYKILTEAGVLGLLEKKYASDPEKLALIRRFGNFFTYFTGFNQNRENYYATDEKATAVAYRAINENLLTFANNCELFEKISVLSLSEREKKIFNPDSYSEYLTQSGIDFYNEMLANIRSKANLYTQEHKTKLPQPKLLYKQIGSPRGNTIPFDLINKDEEFQKMLHTMIAETDQRIPEFNKLLESIFEENADLSQIFLSKTSLNIISNRYFSSWHTLLEKGVELKLFKFKKNDEESFKLPAYLSLAELKELLEAVPFQTAEKSDTTEGNHHQASLLKLQRENLHLESSHSNWELLLKSMKSDFESFWTGEGEFGSYTSAKKALQSLSTLESSNQEHKNLIKMLLDNALCAYRILKWFKIDTSKLGFVPEGEFYPSLDQLLQDYPLPKWYDMIRNYLTRKPYSQAKLKLNFDCSTLLNGRDKNKETQNLSVILRKDGKFYLAIMKKDQNKFFEKSALYEGNLGTMEKMDYKLLPGANKMLPKCLMPGSDKKKYRASDQVLELYAKGSFKKSEKSFNLADLHTLIDFYKSALPKYEDWKVFNFQFQATENYQDISQFYREVEQQGYLLNWRKVNEELIKQGIKDGSLFLFQISSKDFEGKSKTPDLQTLYWQQLFKNQTNVKLNGEAEIFFRPGSMKKEKKTLKVDNYDVFKHKRYTEDKILFHVPITLGFGNNEVSPSAPSKFNQKLNQELIIPHFDDLHVIGVDRGEKHLAFYSVVSVKTGKIVKQGTLNLLNGTDYEAKLSQKAENRLHARQNRDTIEKIADLKNGYISQVVNKLVELVLEYNAVIVFEDLNAGFKRGRQKIEQSVYQKLELALAKKLNFIVKKEKAVGESGSVTSAYQLAPQINTFGDIKGKQRGIMLYTRANYTSVTDPLTGWRKQHYFKKGSSEEMKAQFFKSYKNLTRDAGQKAYIFDDGTWLLYSNVERRRGKRGDHRERTQIKYDPSLELDTLFSKYQIEKSHSLFDQLKNREFPQTFWTSFFRILDLIMQIRNTDDKGRDIILSPIGNAQERFDSRKRYDQLPCDEKGLIIEESEFEYPTSGDANGAYNIARKGMMMLERIKENPEKPDLLIRDAEWDSWSK

SEQ ID NO: 3213 - protein, 1276 aa, unidentified
MKNENIFTNFTNLYEIPKTLRFELKMAGGIINEDLFLSDQNFKGKTWTEYYLAKNEVFGKDQIILEAYKRIKPYLDKLHVIFIEESLENLVLDYSEAEKCFLELQNESKKEKKDKIRKELYNIFAKLRKEFTKNFERIGNIWKENYENKTFIDEKGKTRNYKIAGKGYEVLLSDTNLDILIDIFSEETEGENVLIKNIKGEKINIFKSFKGFTTYFSNFNESRKNFYLGDGKSGRIATRIINENLTFFLKNKKNFDEKYKENQIFIEKFNEILNNYGENIEAFFNLNFYNKCYTGKQIEYYNQLIGELNSVINTQKQADYSKYIQGKKDNKNIEFKKSDYPLLKELYKQILSEKDIEKNFIEIENFSDIKTYLKDFYIDNSKRNEIAKNLINNLVNNFDLEFDISKIYVSKISLNTISAKFFGSSKWNFIQKKLLGKIGNKNKNGKLELPDFIDLKIIKDILEETQNENEEDIFKNEFNKIESKNSFEKFLKIFFEELYENIKNSETNWGKVEKNILTLENFSKASEEKEKQIEIIKNYLDSNLNIFRMMKYFALEKGKENLEAKYENNENFYNEFKKFYLDNEIISYYNEFRNFLTKKSYNQDKIKLNFEKGNLLGGWTDSPEGNTQYGAFLFRKGEKFFLGITNFPRILDIEKNPNAYKIEGNNFYEKMTYKQIDSKIIYGSSYLGKYGSKYSDDKEVLSGQELIKRIKELLKEKISFFPELNQFIEKEYSDPKDLANDLKEYSFYSINFNKKVSANFIENGFFEENKILYLFEIYNKDFSAGSKGKQNLHTMYFKGLFEENNLKNIVLKLNGQAEIFRRKASISEPIFDTERNAKVIITEHKRYTEDKLFFHCPIKLNFNRKEKNINDKILELINKNENINIIGIDRGEKHLAYYSVIDQKGNILKDENGKPVKGSFNIIDIFGKNNEKVGEKNYYEKLVEKEGERKEARGSWKTIGNIKELKEGYISQVVHKLAELIIKYNAIIIFEDLNSGFKRGRQKIERQVYQKLEKALIEKLNYLTFKDKNFGEAGHYLSAYQLTQPFETFEKIGKQTGIIFYTDPSYTSQTCPNCGFRKDLYLKYSNLKNAIGDIEKINSITFEKGRFIFEYNKRKVFSDRDRKRNISSIESGVKGWKTVDDNITENLEELFKKYKINFQNGESIITQIQEVNKQELYQKVFENFNAILKIRNSTIGDNSRNGDFICCPSCDFDSRFDTKLGIENGDDNGAFNIARKGIIILDKINKAFEKKKEASKINGEDMIVRQEDWDKFLGNK

SEQ ID NO: 3214 - protein, 1217 aa, unidentified
MENNNFKDFTNLYEIPKTLRFELRPREKTKIQLENDGVVKKDKQIEKDYHEIKKFLDLIHIEFVEKSLENIYLENLEEYFETYNYLKLNPKDRNLKNKFEKIEISLRKELVSFFILEGNSWVNKYSFLKKGGIGFLTEKEVLDLLEIKFPDNKNLFERFKGFFTYFQNFNESRKNFYSDDGRTGAIATRAIDENLIIFIENIKKYEEFNIKNPNFFTDKEKEIFKIEFYNFCVNQKGIDKYNEIIGARNLEEGKNTEGINQRINLKKQNDLRNSSKNKNYPKFDLLYKQILSKKDKADFIESIESDSELFNEIEKSKERNYQKIKGAINIFEEFFKNIDNNNIYDLKEIFLSKISINTLSSKYFEKWNSLAGFLEENGNKKLFSLLDVKNALDSQGKGIFSKIYKNIISENKTNFENFINIYNYEFHKKLEEIEENLSKINKINEKNFTRKEKEIQIIKNYFDSVLDFYKMTKYFKVELKKYDDKIDKDISFYTKFDEYIDNFKIWKDYNLVRNFLTKKNIKTDKIKLNFDNSQFLKGWDRDKEKERLGIILRKNGKYFLVILKKGNNKIFENYKYEGGDFYEKMEYKQLNNVYRQIPRLCFPLQKKINSLKSEEKNKYIEKYIENFGYNEEIAKIKEEFDNFQKNKEKGDRFDIEKIKKLIEYYKNAILKKYGKTYNLSKIEKNNYDNLSEFYDEVEKAMYSLKFVNIGADFIDNLEENGDIYLFQIYNKDFSETKEENSKENIHTKYFKYLFNENNLNNLKIKLSGGAEVFFRDKTENLEQAKDKNGENMFYKLNGENLKVLKHRRYVKDHFQVNISITLNTNSGDMFGFNKFFNNNFDVQHIIGIDRGEKNLAYFSVIDLNGKIKEIGSLNLVNEINYLARLEEKEVKRANERLNWWEIENIKNLKDGYISALVNEICKLIIKYKAVVVFEDLNAKFKTGRQKIEKQVYQKLELALAKKLNFLNFKDKKDTETGGIGNSIQLTPKIIDYQDIANYKQSGIMLYTNPAFTSTTCPECGWRKTVNFPKKINKEVLIKFLENIEISYNSENFIFKYKNGIGNVEEISSIGERTYWNNKDRKTEKINLNYELKKLFLENKINIEENISKQINSKDITLKCLEKLLWIFKLVNSIRNTDSASNKDIIHCPSCGFNSENGFQGFIYNGDANGAYNIARKGIIMLENIKVNSERPNLFISNSDWDKYLGRKKISLLDIIYE

SEQ ID NO: 3215 - protein, 1245 aa, unidentified
MFYLLFSKKMKSDFFAPFTNLYPIQKTLRRELKPLNENFQHDPALTALRNSEIPQRDQQREKDYQAIKPLLDELHNQFITESLQSLEPQDRSDFVDFYQNYQKSKKNKANLSEKELKNLDEEFESRTKALRTAIGTSFSNTAELRKSNPDYVNEKGKPFLDQKSYKILTEAGVLGLLEKKYASDPEKLALIRRFGNFFTYFTGFNQNRENYYATDEKSTAVAYRAINENLLTFANNCELFEKLSVLSLSEREKKIFNPDSYSEYLTQSGIDFYNEMLANIRSKANLYTQEHKTKLPQPKLLYKQIGSPRGNTIPFDLINNDEEFKKMLHTMIAETDQRIPEFNKLLESIFEENADLSQIFLSKTALNIISNRYFSSWHTLLEKGVELKLFKFKKNDEESFKLPAYLSLAELKELLEAVPFQTVEKSDTAEGTHHQVSLLKLQRENLHLESSHSNWELLLKSMKSDFESFWTGEGEFGSYTSAKNTLLSLSTLESTNQEHKNLIKMLLDNALYAYRMLKWFKIDTSKLGFVPEGEFYPSLDQLLQDYPLSKWYDMIRNYLTRKPYSEAKLKLNFDCSTLLNGRDKNKESQNLSVILRKDGKFYLAIMKKDQNKFFEKSALYEGNLGTMEKMDYKLLPGANKMLPKCLMPGSNKKKYGASDQVLELYAKGSFKKSEKSFNLPDLHTLIDFYKLALPKYEDWKVFNFQFQATENYQDISQFYREVEQQGYLLKWRKINEELIKQGIKDGSLFLFQMSSKDFEGKSKTPDLQTLYWQQLFESQTNVKLNGEAEIFFRPGSMKKEKKTLKVDNYDVFNHKRYTEDKILFHVPITLGFGNNEVSPSAPSKFNQKLNQELIIPHFDDLHMIGVDRGEKHLAFYSVISVKTGKIVKQGTLNLLNGTDYEAKLSQKAENRLHARQNRDTIEKIADLKNGYISQVVNKLIELVLEYNAVIVFEDLNAGFKRGRQKIEQSVYQKLELALAKKLNFIVKKEKAVGEPGSVTSAYQLAPQINTFGDIKGKQRGIMLYTRANYTSVTDPLTGWRKQHYFKKGSSEEMKAQFFESFKNLSRDAGQKAYIFDDGTWQLYSNVERRRGKRGDHRERTQIKYDPSLELDTLFSKYQIEKSDSLLDQLKNRDLPQTFWTSFFRILDLIMQIRNTDDEGRDIILSPIGNAEERFDSRKRYDQLPRDEKGLVIEESAFEYPTSGDANGAYNIARKGVMMLQRIKENPEKPDLLIRDAEWDKKITRK

SEQ ID NO: 3216 - protein, 1245 aa, unidentified; identical to SEQ ID NO: 3215

SEQ ID NO: 3217 - protein, 1459 aa, unidentified
MPQQVKPPVTQRAYTLRLRGADSNDQSWRDALWQTHEAVNRGAKAFGDWLLTLRGGLDHTLADTKVKGGKGKPDRDPTDEERKARRILLALSWLSVESKLGAPEGFIIASGTEAAEDRNAKVVAALEEILKSRNVATNEIDEWKNDCSASLSAAIRYDAVWVNRSKAFDEAVKSIGSSLTREEAWDMLERFFGSRDAYLAPAKGSEDESSETEQEDKAKDLVQKAGQWLSSRFGTGKGADFRRMADVYNKIAEWAGNPQTSTTGNEAINNLAAALSEFNPASNDLQGVLGLISGPGYKSATRNLLTQIAAKATVTQQDLASLKDKATKDAQKCNQNTGSKGKRPYSDAILKNVEAVCGFTYLQDGDSARHSEFAVILDHAARRVSLAHTWIKRAEAERSRFEEDAKKVDQVPEAAKDWLNNFCLERSGLSGAQEPYRIRRRAVDGWKEVVTAWSKADCKTAKDRIAAARALQDDPEIDKFGDIQLFEALAENDAVCVWHKDGDAAKAPDPQPLIDYALAAEAEFKKRHFKVPAYRHPDALLHPIFCDFGKSRWDICFDVHKKVQTPFPRALCLTLWTGSGMVSVPLCWQSKRLARDLALGQDAQNDGSSEVTRADRLGRAASNVTKSDEVKISGLFEQADWNGRLQAPRQQLEAIAVVRDNLSLSDQERERRMSGLMDRIRWLVTFSAKLQPQGPWCEFAEKLQLRINPQYWPHADTNKDRKSHARLILSRLPGLRVLSVDLGHRYAAACAVWEAVNAEQIKVACQAAGHREPKESDLYLHLKRKVTKQKKGNQVESEKTTIYRRTGADTLPDGKLHPAPWARLDRQFHIKLQGEEERVREASNEEIWAVHQLEAELGRTVPIIDRLVKAGWGQAGKQKTRLEALRELGWTPAKEAQGSDETEEGEPRKPSLSVDELMSSAVRTMRLALNRHSDRARIAHYLITDEKTKPGGIKEKLDENGRIDLLQDALVMWHDLFSSRGWRDIAARQLWDDHITRLSGYKAPEEIGEDASGVERKTKQKENREKLHDVAKALAQDVTLRGALHDAWKKRWEEDDGRWKKQLRWFKDCVLPRGKHASDPTIRKVGGLSLPRLATLTEFRRKVQVGFFTRLHPDGTRAETGEKFGQSTLDALEHLREQRVKQLASRIVEAALGIGSEGGKGWDGAKRPRQRISEPRFAPCHAIIIEDLTHYRPEETRTRRENRQLMTWSSSKVKKYLAEACQLHGLHLREVSASYTSRQDSRTGAPGIRCQDVPVNEFMRSPFWRKQVKQAEAKQAENKGDARERFLCDLNAMWKDKTVADWEKAGIIRVPLRGGEVFISADPISPAAKGLQADLNAAANIGLRALTDPDWPGKWWYVPCDPASFKPTSDKVKGSTAINLDVPLKDVSAVSGDVTRKKSGKAKSQSKEVVNLWRDVSSREILTTGVAWEVYSAYQNQVQARVVDILRRSACPKNSREKQ

SEQ ID NO: 3218 - protein, 1091 aa, unidentified
TRAVWFEFDLAAFIEAIKAPRRYFEDTMKREASADRFRQQITAMEGKGREASSTEEDSEPLPGFDSDERVRLLKIIVQDKLKWVAEAEGDASETGPKEYAIRERTVRGFSEIKRRWRNAVESSNATEKRLLEILAEEQTTHRDDFGSATLYQQLAKPEFHAIWRNEGTQPWHAEDPLTAWLQYKELQADLADKERAIRFTPAHPKYSPRFFIFPKKSEAQPKTANHHHTKPGLLSRHDPGQLSFTGGVILRTEHGLAPTIVRIHYAAPRICRDQLRSSGDTNLYEAPWLQPMMAALGLDKSPERVNFANCRITLQPTNESDIHLTFPIEVNSEKIKAGVSRETVWENQFNLYPDGENFYNASLRWPHEKQRAKPPLPWHEQLDSFRCIATDLGQRDAGAFARMSVLGGSDFDKRPSRFIGEAGGKKWRAALERSGLFRLPGEDAQVWREKSSKDEKNPEDSGKPFDFREELWGERGRPARSWEADDTAELMRLLEVPPDAKELSLLAEGWRSLLSFPEQNDKLLVAMRRYQSRIARLHRWCWFLKGDDKQQKSAWDEIADCEDTRLISGEQIAQAKKHDPRLQTELASQLQKRLELAPVLLVRIANRILPLCSRSWHWEKHPASKAQNTLHHLTQNGPKLDSKERPVWLRGQRGLSLERIEQVEELRKRFQSLNQTLRREVGGKPPIRRDESVPDPCRDLLDKLDNLKEQRVNQTAHMILAEALGLCLAPPPADKKTLRQQRDLHGTYEKITDKSGKWIGPVAFIIIEDLSRYRASQGRAPRENSRLMKWCHRAVRDKLKQLCEIFGIPVVETPAAYSSRFCSRSGIPGFRAEEIAPGFEKTAPWSWIKEKKDDRGQPTTEAAHIQELIQQMAEAQKIPTRSDKPLAKPRTLFAPLAGGPVFIPIVDSIPGAELAPKLVQADINAAINLALRAIADPRLWTIHPRLRTQREGGNKPGKAKNQKTQQTASGTPTEVKLLTREKRKFGELGKPLVIKRASSAKPDDTRQPNFFADLAGLNELAEQLAKKNPREYSWLTKEWTSAEISGGNTTPPLVHGKSFWGTVKAKQWDRIRAINSARLAAWRSKGDDVSM

SEQ ID NO: 3219 - protein, 1091 aa, unidentified
TRAVWFEFDLAAFIEAIKAPRRYFEDTMKREASADRFRQQIAATEGKGREASSTEEDSEPLPGFEGDERVRLLKIIVQDKLKWVAEAEGDASEAGPKEYAIRERTVRGFGEIKRRWRSAVESGNATEKRLLEILAEEQTAHRDDFGSATLYQQLAKPEFHPIWHNEGTQAWHAEDPLTAWLQYKELQADLADKERAIRFTPAHPKYSPRFFIFPKKSEAQPKTANRHPTKPGLLSRHDPGQLSFTGGVILRTEHGLAPTIVRIHYAAPRICRDQLRSSGDTNLYEAPWLQPMMAALGLDKSPERVNFANCRITLQPTNESDIQLTFPVEVNSEKIKAGVSREAVWENQFNLYPDGENFYNASLRWPHEKQRAKPPLPWHEQLNSFRCIATDLGQRDAGAFARMSVLGGSDFGKRPSRFIGEAGGKKWRAALERSGLFRLPGEDAQVWREKSGKDEKNPEDSGKPFDFREELWGERGRPARSWEADDTAELMRLLEVPPEAKELSLLSESWRSLLSFPEQNDKLLVAMRRYQSRIARLHRWCWFLKGDDKQQKSAWDEIADCEDTRLISGEQIAQAKKHDPRLQTELESQLQKRLELAPVLLVRIANRILPLRGRSWHWEKHPASKAQNTLHHLTQNGPKLDSKERPVWLRGQRGLSLERIEQVEELRKRFQSLNQTLRREVGGKPPIRRDESVPDPCRDLLDKLDNLKEQRVNQTAHMILAEALGLRLAPLPADKKTLRQQRDQHGTYEKIPDKSGKWIGPVDFIIIEDLSRYRASQGRAPRENSRLMKWCHRAVRDKLEQLREVFGIPLVETPAAYSSRFCSRSGVPGFRAEEIAPGFENESPWSWIKEKKDDHDQPTAEAAHIQELIQQMAEAQKIPTRSDKPLAMLRTLFAPLAGGPVFIPIVDSIPNAELAPKLVQADINAAINLALRAIADPRLWTIHPRLRSQREGGNKPGKAKMQKAKKEASDAPTEVKLLTREKRKFGESGKPLVIKHASSAKPDDTRQPNFFADLAGLNELAEQLAKKNPREYSWLTKEWTSAEISGENTTPPLVHGKSFWGTVKAKQWERIRAINSARLAAWHSKGDDVSM

SEQ ID NO: 3220 - protein, 1230 aa, unidentified
  VARIANT 1226: note = X can be any amino acid
MKKIDSFVNYYPLSKTLRFSLIPVGKTEDNFNAKLLLEEDEKRAIEYEKVKRYIDRYHKHFIETVLANFHLDDVNEYAELYYKAGKDDKDLKYMEKLEGKMRKSISAAFTKDKKYKEIFGQEIIKNILPEFLENEDEKESVKMFQGFFTYFTGFNDNRKNMYTHEAQTTAISYRCINENLPKFLDNVQSFAKIKESISSDIMNKLDEVCMDLYGVYAQDMFCTDYFSFVLSQSGIDRYNNIIGGYVDDKGVKIQGINEYINLYNQQVDEKNKRLPLMKKLYKQILIEKESISFIPEKFESDNIVINAISDYYHNNVENLFDDFNKLFNEFSEYDDNGIFVTSGLAVTDISNAVFGSWNIISDSWNEEYKDSHPMKKTTNAEKYYEDMKKEYKKNLSFTIAELQRLGEAGCNDECKGDIKEYYKTTVAEKIENIKNAYEISKDLLASDYEKSNDKKLCKNDSAISLLKNLLDSIKDLEKTIKPLLGTGKEENKDDVFYGKFTNLYEMISEIDRLYDKVRNYVTQKPYSKDKIKLNFENPQHLGGWDKNKERDYRSVLLKKEDKYYLAIMDKSNNKAFIDFPDDGECYEKIEYKLLPGPNKMLPKVFFASSNIEYFAPSKKILEIRSRESFKKGDMFNLKDCHEFIDFFKESIKKHEDWSQFGFEFSPTEKYNDISEFYNEVKIQGYSLKYKNVSKKYIDELIECGQLYLFQIYNKDFSVYAKGNPNLHTMYFKMLFDERNLANVVYQLNGGAEMFYRKASIKDSEKIVHHANQPIKNKNADNVKKESVFEYDIIKDKRFTKRQFSIHIPITLNFKAKGQNFINNDVRMALKKADENYVIGIDRGERNLLYICVINSKGEIVEQKSLNEIIGDNGYRVDYHKLLDKKEAERDEARKSWGTIENIKELKEGYLSQIVHEISKLVIKYDAVIAIEDLNSGFKKGRFKVEKQVYQKFENMLCTKLNYLVDKNADANECGGLLKAYQLTNKEDGANRGRQNGIIFSVPAWLTSKIDPVTGFADLLRPKYKSVSESVEFISKIDNIRYNSKEDYFEFDIDYSKFPNSTASYKKKWTVCTYGERIINVRNKEKNNMWDNKTIVLTDEFKKLFADFGVDVSKNIKESVLAIDSKDFYYRFINLLANTLQLRNSEVGNVDVDYLISPVKGVDGSFYDSRLVKEKTLPENADANGAYNIARKALWAIDVLKQTKDEELKNANLSIKNAEWLEYVQKXASTR

SEQ ID NO: 3221 - protein, 1230 aa, unidentified
  VARIANT 12: note = X can be any amino acid
  VARIANT 23: note = X can be any amino acid
  VARIANT 132: note = X can be any amino acid
  VARIANT 164: note = X can be any amino acid
  VARIANT 215: note = X can be any amino acid
  VARIANT 286: note = X can be any amino acid
  VARIANT 303: note = X can be any amino acid
  VARIANT 364: note = X can be any amino acid
  VARIANT 456: note = X can be any amino acid
  VARIANT 557: note = X can be any amino acid
  VARIANT 577: note = X can be any amino acid
  VARIANT 621: note = X can be any amino acid
  VARIANT 623..624: note = X can be any amino acid
  VARIANT 637: note = X can be any amino acid
  VARIANT 679: note = X can be any amino acid
  VARIANT 709: note = X can be any amino acid
  VARIANT 744: note = X can be any amino acid
  VARIANT 764: note = X can be any amino acid
  VARIANT 793: note = X can be any amino acid
  VARIANT 884: note = X can be any amino acid
  VARIANT 923: note = X can be any amino acid
  VARIANT 986: note = X can be any amino acid
  VARIANT 989: note = X can be any amino acid
  VARIANT 1014: note = X can be any amino acid
  VARIANT 1032: note = X can be any amino acid
  VARIANT 1042: note = X can be any amino acid
  VARIANT 1085: note = X can be any amino acid
  VARIANT 1091: note = X can be any amino acid
  VARIANT 1130: note = X can be any amino acid
  VARIANT 1191: note = X can be any amino acid
  VARIANT 1195: note = X can be any amino acid
  VARIANT 1203: note = X can be any amino acid
  VARIANT 1208: note = X can be any amino acid
  VARIANT 1213: note = X can be any amino acid
MKTLRRELKPVXKTLEYIKKDQXVLDTDTTRDQGYMQIKPILDALHNDFIKQSLEKTSIDVSDFFVFYTDYKKKLINKKSLTDKELESLQKEFDQRKKELRQAIGNVYIYTAEERKNIYTDEKGKDLLKASXYKILTESGIQKVLEQRYQHDVQALEIIKSFAXFWTYFTGFNQNRENYYTVEGKVTEIAFRIIDQNLITFCNNILLYDKINDIXLTQEEQEIFDPQSYIHFLTQEGIDRYNYTIGGTIDEHGKRITDGINQRINQHNQQHKTKLPQLTTLYKQIXSDKGKTKLFESIESDGXLEQTIAEYMALCDQQVPKIQKTITDFFGGMEQLDKVWISKVHLTWLSNKFFANWYMVSEQXQALGVFSKKKDSNKERQVKVPDYVSLADLKSILENVVIPDQTGVEEDKKITLFKKELEKNKTTNVNNREYFVSLLKNHYETILDNDDDENLXLRQTQEQVKRIDAFDTQNQHHKNTVKVFGDKTIELLRFLKLWRVDVSKWQQETSDFTKEIDLLIQDFDVNRYYDLIRNYVTKKPFSIEKMKLNFDCSTLLXGWDKNKETQNLSVILKDNEXYYLAIMKKENNQFFDQRNKKLYAVSSEFEDIHKMEYKQIALPTXVXXFVRKCFNSAQAYXRTCPVECLNSENKIIIKNDEVSDLPVLIQCYKDFFNKYEKDXFKYKDFNFQFKENTDYVRLSDFFSDVERQXYKLSRTPINKQELDTAVEKGQVYLFRLSSKDFGKXQTDKKPNLQTLYRLDMFRPXSNIKLNGGAEVFFRPASLKDKKRKKTKHXESINDNAIEKKRYTEDKILFHCPITLNFASKKVTKVNDEINEYIKNNQCNIIGIDRGEKHLNFYSVINPQGDIIEQGTLNIFEYEYTDKEXKLQKKSVDYGQLLEENAQNRLSARQNRETIGKIKELKEXYISHVVKKIADLVLKYNALVVLENLNTGFKNSRKKIEKSAYQNLEVALAKKLSFLVDKSKNTXELXSVTNPYQLCPFAGTFGDIERATQRXIILYTRANYTSTTDPITXWRKTIYLKKXSVDEMKKNIQESFVSIGFDTSKQAYYLQDKKRRLRSNVERRRXAKNAHXKWIEKQYNPTEELDKRCTKYAITKNSDILSQLHSQESVXCFQTLIWIIDLIMQIRNSDAEKNDFIVSCVEDKNGNKFDSREYYKLTDQEKANNISKPTSXDANXAYNIARKXIIMVXKIKKXEKSLFVSDSEWDLSLNP

SEQ ID NO: 3222 - protein, 1160 aa, unidentified
  VARIANT 99: note = X can be any amino acid
  VARIANT 123: note = X can be any amino acid
  VARIANT 126: note = X can be any amino acid
  VARIANT 143: note = X can be any amino acid
  VARIANT 146: note = X can be any amino acid
  VARIANT 319: note = X can be any amino acid
  VARIANT 322: note = X can be any amino acid
  VARIANT 325: note = X can be any amino acid
  VARIANT 370..371: note = X can be any amino acid
  VARIANT 387: note = X can be any amino acid
  VARIANT 420: note = X can be any amino acid
  VARIANT 442: note = X can be any amino acid
  VARIANT 467: note = X can be any amino acid
  VARIANT 532: note = X can be any amino acid
  VARIANT 542: note = X can be any amino acid
  VARIANT 558: note = X can be any amino acid
  VARIANT 609: note = X can be any amino acid
  VARIANT 627: note = X can be any amino acid
  VARIANT 631: note = X can be any amino acid
  VARIANT 659: note = X can be any amino acid
  VARIANT 679: note = X can be any amino acid
  VARIANT 712..713: note = X can be any amino acid
  VARIANT 863: note = X can be any amino acid
  VARIANT 929..930: note = X can be any amino acid
  VARIANT 934: note = X can be any amino acid
  VARIANT 943: note = X can be any amino acid
  VARIANT 1014: note = X can be any amino acid
  VARIANT 1060: note = X can be any amino acid
  VARIANT 1069: note = X can be any amino acid
  VARIANT 1113: note = X can be any amino acid
  VARIANT 1116: note = X can be any amino acid
MSSLLSEFTSLYGLSKTLRFELKPVGKTKEYLSKDDFFKEDTSKADSYSLMKQLLDGLHRDYINEALAKVTKLSIDLEPDYIELRKEIASYFTNSKLLXEKDTINQLLQRYPEHKIHIEQFQXFRXYFKTYKQNRENLYKNEXKAXQIATRLIDENLPRFLKNKQIIESSLLKLSDFSVIEKNEKQEQKSKLIKDYSVFFDIGNYYYYLTQASIDAYNQTVGHFNHSINLYKQQNGAVKIPLLQLLYKLPLAPKEAVHWLPQQLENDEQLLQTIQSVKSSIDTSILPFIQTILQPTLSSDNNYDRHGIYISLKTLEHRXGIXLTXWSSFREMTHDLSKAGDDPKLKKEYKDFPFVSLQQVKDYLDEKQKXXIEHTAIFGEGKAKDIXLKSYNTYFFELVASAVHEIIVSYQDAKQNYEQXLTKDNQKKLMDTSLSLRRLLGXFILVHKKVRLNPNIKESYFYDGEKXLDAAIFDDNDDPIHTSYDKVRNYLTKKPYSNDDKIKVNFENPTLLDGRDQNKERNNSGILLRKNXLYYLAILKKXHNIFFDEKRNNKLYDXSGYEKLIYKLLPGPNKMFPKVIFSKKNIDFFSPPKEIIRIRSQESFKQGEXFSLKDLHTWIDFLKDALXKYEXWKCYDFNFKKTSEYQKINEFYQQVESQXYSMKWKNIDEDMCDQEIEKXNLYLFQIHNKDFGMNSSGNSNLHTKYFLALFAXXDNNLFKLNGEAEIFWRKATLERQTKGKSPKHQVEIIEKRRYTEDKLMLHIPITLNFCRNETKFNDLMKKTIKEKVHGVTILGIDRGEKHLLYYSLMKQDGTIIKTGSRNVIANKIKQVDYHQKLEEREIKRDEAQLNRDQQEQIKDLKSXYISQVIHEISKIVIDHNAIIVLEDLNSGFKRGRQKVEKNVYQQFELALAKKLNYLVFKKTPDNQAXXTMKXYQLTPPVAXFKDLSFQTGIIFYTPAGYTSTTCPSCGWRKNLYLKYQNEKSAKEELKKISMSKTNDYYTITYTVPQDTTKXKSDTVLNKTQRTLTSKNQHRNQYNRTTKQDLPHDITGWLNTLFDQXNFDYASWLXQASVTQCKTLIRVLNLLMKIRNAKTGTEIDIIQCPACGFHSNQXFQXHQYNGDANGAYNIARKGAIILKKISDEEKSTIVRQFECDNERSK

SEQ ID NO: 3223 - protein, 1308 aa, unidentified
  VARIANT 78: note = X can be any amino acid
  VARIANT 119: note = X can be any amino acid
  VARIANT 153: note = X can be any amino acid
  VARIANT 177: note = X can be any amino acid
  VARIANT 213: note = X can be any amino acid
  VARIANT 235: note = X can be any amino acid
  VARIANT 260: note = X can be any amino acid
  VARIANT 266: note = X can be any amino acid
  VARIANT 306: note = X can be any amino acid
  VARIANT 355: note = X can be any amino acid
  VARIANT 451: note = X can be any amino acid
  VARIANT 473: note = X can be any amino acid
  VARIANT 637: note = X can be any amino acid
  VARIANT 664..665: note = X can be any amino acid
  VARIANT 669: note = X can be any amino acid
  VARIANT 724: note = X can be any amino acid
  VARIANT 813: note = X can be any amino acid
  VARIANT 892: note = X can be any amino acid
  VARIANT 1038: note = X can be any amino acid
  VARIANT 1162: note = X can be any amino acid
  VARIANT 1200: note = X can be any amino acid
  VARIANT 1253: note = X can be any amino acid
MSNNFQEFTQKYALSKTLRFELKPVGKTKEILEKEMPMYQIINADKNIKAKYIQTKPFFDQLHRDFIKEAFENVELSXLSDFFENWKIYKQDKKANEKIYKKSAENLRKEVVSFLNAKXKDWAEKYHSSGLKKADIEILFEEGIFKVLEIRYXTDTNSFITNATTGEITSIFQGWKXFTGYFLKFWNTRENYYKTDGTSTAIATRIVDQNLPXYLENLEIFEKMKGKIDFESVRXDFSDFEKIGTVEYYSTCLLQEGIDXYNRIIXGYTYENGEKIKGINEIINLYRQTHKDEKVPFLKTLDKQIXSEKIAFMETIDTPEEFRKIFEEFVLKSSEKVVLLKQCLNHLFENELTDXVFLSKESLNTISHKWIDIGNMKLFHESLFTILKKEGAKYDSKEDEYKFPDFIRISDIKTALVKITTESFFWKNRYLYEKDENPTGFLTSDNSLWEXFIQIFSHEFSSLFERTEKDEEXKDIQWGYDISLLNIQKLLENNEYNPNDEKNKIIIKSFADDILRIYQMGKYFALEKKRQWNLDSYKIIVQGYNDIRNYLTKNPWSEEKWKLNFENPTLANGWDKNKETDNSCIFLKRDNKFFLALMSRGNNQVFDERNIQKFAQNIEQGKYEKMVYKYMKDVALXIPKATTQLNAVQEHFFQSDKDYIITKXXSSIXEFIKPLRVTKRIFELNNRIYPKDNLGISFLRNQVNKKEQKNYIKIFQKEFITLGXDEVVYKKAVHDWIDFCKEYTKSYPSCAYFDYSGLKDTKEYSSIDEFYNDLDSFGYQISWQDISSSYIDELVESGKLYLFEIYNQDFSNXKTGAKNLHTLYFEHIFSKENQEVNFPLKLNGQAELFFRPKSIEAKGENRKFNREIIAKKRYTEDKIFFHVPLTLNRTEXDIYGFNTEINNFLAHNPDINIIGIDRGEKHLAYYSVIDQKGNIIESDSLNTVNEINYGEKLTDTAEKRKQARQDWQAVEGIKNLKKGYISAVVHKLTDLIIKYNAIVIFEDLNMRFKQIRGGIEKSVYQQLEKALIEKLNYLVEKXEINPEKAGHLLNAYQLTAPFETFKDMGKQTGIVFYTQAAYTSKIDPVTGWRPHLYLKYSSAEQVKKEIAKFSNIIWNNTEKRFDFMYDIRNFSTQKEYPKNNIWTVCSSVERYRWDKTLNQNKXDYVHYKSITPEFEKLFSDFQIDGTKNILEQINRMETKXNEKFFKSFIFFFGLICQIRNTNKADSDENKQDFILSPVVPFFDSRDSENTKNXLPRNGDENGAYNIARKGLIILQKINEFSDENGNCDKLGWKELSISQVDWDNYIKT

SEQ ID NO: 3224 - protein, 1313 aa, unidentified
  VARIANT 39: note = X can be any amino acid
  VARIANT 106: note = X can be any amino acid
  VARIANT 140: note = X can be any amino acid
  VARIANT 148: note = X can be any amino acid
  VARIANT 180: note = X can be any amino acid
  VARIANT 199: note = X can be any amino acid
  VARIANT 262: note = X can be any amino acid
  VARIANT 269: note = X can be any amino acid
  VARIANT 380: note = X can be any amino acid
  VARIANT 384: note = X can be any amino acid
  VARIANT 483: note = X can be any amino acid
  VARIANT 521: note = X can be any amino acid
  VARIANT 692: note = X can be any amino acid
  VARIANT 706: note = X can be any amino acid
  VARIANT 724: note = X can be any amino acid
  VARIANT 761: note = X can be any amino acid
  VARIANT 780: note = X can be any amino acid
  VARIANT 898: note = X can be any amino acid
  VARIANT 907: note = X can be any amino acid
  VARIANT 946: note = X can be any amino acid
  VARIANT 986: note = X can be any amino acid
  VARIANT 1049: note = X can be any amino acid
  VARIANT 1095: note = X can be any amino acid
  VARIANT 1105: note = X can be any amino acid
  VARIANT 1159: note = X can be any amino acid
  VARIANT 1195: note = X can be any amino acid
  VARIANT 1278: note = X can be any amino acid
MGDGKNFEDFVGLYSLSKTLRFELKPVGKTKENIKEENXVLERDEQRNKDYIKIKPLFDKLHDEFIQESLSDVKIDWSDFYDFYVAYKSKMRNKSALSAKDLKQIXDEFESRQKKLRKDIVELYKKTADEWKSRYINDKXKAILKEKXYKILTENKILKVLEEIYEGQSDELDVIKNFDXFFTYFVGFNQNRENYYDDXEKSTAVAYRIVNQNFLTFCNNVLLKEKIVEIGLSDDEKQIFETNLYNKCLNQQGIDIYNEIIXGKKDEKXIRISDGINQKLNEYAQKNKKKMPQLKILYKQIGSLKAKTIPFDLVETDEELKNEIKKFIKYSNEYNPLIKEFIKEILEKQIDLDKIWISKSSLNWISNIFFASWFAMNEIXLEQXLFKKKKNKDGDEEIKIPEYVSLEQIKNLLEAVEYIDQSDLEEEKRMYLFKKDYEHQRGLEKNNWKFFIEIIKAYFRNLFEDEEYGINNSKKILEKIVDXFDKTNSKHKNNLKLFADKNLDILRYLRLFRVDPSKLIXGELSGLYNDFDKIVEEYPIHKLYDVIRNYITKKPYSADKMKLNFNCSTLLAGWDKNKETQNLSVLLKDEENYYLAIMKKDNNKFFDKSKNSILYDKKGDLVYKMDYSFWSDVSKMIPKCSTQLKAVINSFKDNKDDFIFPVGYKVSSGEKFKKEFKLKKYIFLLNNTIYNXLEERFTTSSADKKXGYKKFQIEYLRKYKDEKXYKEALGAWIDFSKEFLSVYPKTQEFNYSFKETKDYEXLDEFYSDIDKYSYKLSWIXLNKENLWKAAEEGDVYLFQISSKDFQKKDKTSNPDLQTIYWINIFNERSNIKLNGQAEIFFRKSSMKKKNKIKTKKNEYEVVALDKNNIKYNPLEKQRYVKDKILFHCPITLNFGTKXLKNSDFNEXVNQYIKKNDDLHIIGIDRGEKHLAFYSVIDRNENIVEQXTLNIIEGVDYEKILSEKAGNRFKSRQNWDTIGNIKNLKQXYISQAVRKIADLMFKFNAIVVLENLNSGFKNSRKKIEQSVYQNLELALAKKLAFFVNKKTEVXKPGSATSAYQLCPVVNNFGDIEKATQYGVMYYVRANYTSITDPVSXFRKNLYLKKXKIEDMREQILKFQEIGFDNKKNAYYFSYNPQDFINFRGNAKDWTVWSDVERWRXKKDNYGVWKSVKYIPTDELDRLFQKFGILKNDLILXQIENNETLQAGFYQSLIWIIDLIFQLRNSSEDHQDFLFSPVEVDGKKFDTREYYKLNPSEESSNIEMPTSGDANGAYNIARKXLMMVDNIRNDVMSDRNKAFYKLYISDEDWDRYVQG

SEQ ID NO: 3225 - protein, 1255 aa, unidentified
MNHIYNNYQVSKTLRFGLTQKQKIRRPGYTGELYESHKVLKELVKISEEKVKNLIVPAKNEELLSSLDSVKWTLTEIREFLDQWRYIYNKSNQIALDKSYYLILSKKLGFNDEKKSRVIKMIEIKDDIKEKIINYWAFNLNESNQKLLMVNEMVNTQLKALEINRTDHKINEIELRKALQSLFNTVLDILKPLVYREISFINLEKIEKDSKNSLLEKFATDFQRKIDLLEKIRSLKTHFSENGGNVSFCRATFNPKTAIKNPKSNDNSILKEIKKLGIKDILENNENVFYFEKKLAEITAKEKLEYIIKDSESFLIRSLLFKYISIPAFLHHGIATELAPIISKEKNDLINFMISIGQIKSPAKDYADIPNKNDFNVNAYPIKVAFDYAWETVAKSQYHHDINAPVSMCKTFLDENFENCTKTKYFTLYSDLLELHTLLSTLDYGNPSMEDSIIDKANKIIAKIDNKEHKTKDKDLDKDIDKYKETIKNRLNHKNFNDKQRYSDAKKELSQFRGKLKNENDIYRKLTESYKKIAMNTGKIFAEMRDKISNASEQNKISHHALIIEDHNKDRYLFLQEFTTDKEKQIESICNDQAGQYIVYWVNSITSKSISKMLSKKRIEKLKQKKIINNSIKTSILSDAEKEARDIKEWVSFIKEKGWDIDFNLDLQNKNLEEIKKEVDAKAYKLKETLISQKTLSNLVKEGNCLLFPIINKDLVKKVKTEKNQFTKDWNSIFKKDNLWRLTPEFRVSYRQATPGYPTSDIGTKRYSRFQMTAHFLCDFLPQGTKYISNREQIENYKSSEKQKEAVEIFHQQIENDNNNVISTQSLNHLARHFGSKNIKKKHNTIEKKFYVFGIDRGQKELATLCIIDQDKKIEGPFKIYTRSFNTKTKQWEHQFYEERYILDISNLRVETSISIDGKPDQQKILVDLSYYKEGEKFIKLPKMQVKLQQLAYIRKLQYQMQRNPETVLDWSYKNTDDKSILENFVDKPNGEKGLVSFYGAAVIELKDTLPLSEIKDMLERFKELKGKEKNGEDVSQQLNELTQLKSVDHSKYGVVANMVGVIAHLLERYDYKAYISLEDLTKPYSAIDGITGQKTDAKSISGKQQDVEKYAGLGLYNFFEIQLLKKLFRIQKDSQNTLHLVPAFRATKNYENLIAGEDKVKNRFGIVYFVDPKSTSIMCPSCGKTNNSSNKEKRVVRDKKNGNDIIYCEFCGFDTRNDYKENPLKFIKSGDDNAAYIISTHTAKKAYELAKSIL

SEQ ID NO: 3226 - protein, 1255 aa, unidentified
  VARIANT 1246: note = X can be any amino acid
MTLTIKYKESKNKREVYMSNLYSNLHNLYQVQKTLRFELKPQGKTKENMEKVGILEADEHRAEIYSKVKKYCDEYHKLFIDKSLGNIELNGIDRYYELYSINNRDDKQKEELDQLEASLRKQISDAFKKSAEYKGLFQKDIITSYLVTMYKENQEKMQDIGEFNRFTTYFTGYNKNRENMYSEEDKSTAISYRLINENLPTFIDNIKIYKKIVSLMPEDIEKIYKDLEEYIQVDSIDEIFNISYYNDVLTQRGIECYNILISGRTKNDGDKIKGLNEYINEFNQTHNEKIPKLQELSKQILSDAESASFKIDVIKNDKELMNLIEVYYANILPILNKIEDLFTRISNYNLELILVNNDGTLSTLSNMVFNEWSYIKGAISEKYDEKYSGKEKYGTEKYAQKKQEYLKKQKIYSLKFLNDCIGNNAICEYLKNYIIQNKNIETIKEDYNEVQNIKVEDDTKELIKDEKSIEKIKKFLDDVKSLQEFVKLVIPKDRTVEKDAKFYSELTPYYEKIKEIIPLYNKVRNYVTQKPYSTEKIKLNFECPTLLNGWDANKEEANLGVILIKEGKYYLGIINPYCKKIFEVDEKDSNEQNNYKKMEYKLLPGPNKMLPKVFFSNSRIEEFNPSKELQEKYNKGYHKKGKDFDINFCHELIDFYKQSLNKHEDWKKFNFKFKDTSEYNDISEFYREVEKQGYKIEYTEYSEKYINELVDRGELYLFQIYNKDFSEYSKGKENLHTLYWKAVFDPDNIMNPVYKLNGNAEVFYRKKSLEMKVIHPANQPIANKNISTIEAGRSTSTFKYDLIKDKRYTMDKFQFHVPITVNFKSERLFNINQIVNKYLKYNDDIHVIGIDRGERNLLYVCVIDKNEKIVYQKSLNEIVSEYNNNRYTTDYHGLLDRKEKEREIAREDWKNIENIKELKEGYMSQVIHILVELMKKYNAIIVIEDLNKGFKNSRIKVEKQVYQKFEKMFIDKLNYLVFKDEDKMNEGGVLNAYQLTNKFESFTKLGKQSGILYYIPAWCTSKIDPTTGFINRFYLKYENFDKSKEFVNRIDDIRYNEKENLFEFDIDYSKFTDRLNDTKNKWTLCSYGERILTQKNANGEWLDRRIQLSIEFKKLFEKYGINLNNIKDSILKLDKDNLEFYKGNGESLGFIQLFKLMVQMRNSLTGKEEDNLISPVKNRHGKFFNTSEKIEGLPIDADANGAYNIARKGFMLVEQMKNVEDEKLNKIKYNITEKEWLNYVQNRGMXWKRQYLYHI

SEQ ID NO: 3227 - protein, 1259 aa, unidentified
  VARIANT 38: note = X can be any amino acid
  VARIANT 119: note = X can be any amino acid
  VARIANT 132..133: note = X can be any amino acid
  VARIANT 135: note = X can be any amino acid
  VARIANT 185: note = X can be any amino acid
  VARIANT 242: note = X can be any amino acid
  VARIANT 251..252: note = X can be any amino acid
  VARIANT 258: note = X can be any amino acid
  VARIANT 263: note = X can be any amino acid
  VARIANT 357: note = X can be any amino acid
  VARIANT 442: note = X can be any amino acid
  VARIANT 455: note = X can be any amino acid
  VARIANT 554: note = X can be any amino acid
  VARIANT 566: note = X can be any amino acid
  VARIANT 571: note = X can be any amino acid
  VARIANT 598: note = X can be any amino acid
  VARIANT 662: note = X can be any amino acid
  VARIANT 675: note = X can be any amino acid
  VARIANT 679: note = X can be any amino acid
  VARIANT 749: note = X can be any amino acid
  VARIANT 768: note = X can be any amino acid
  VARIANT 796..797: note = X can be any amino acid
  VARIANT 821: note = X can be any amino acid
  VARIANT 834: note = X can be any amino acid
  VARIANT 863: note = X can be any amino acid
  VARIANT 887: note = X can be any amino acid
  VARIANT 891: note = X can be any amino acid
  VARIANT 905: note = X can be any amino acid
  VARIANT 921: note = X can be any amino acid
  VARIANT 940: note = X can be any amino acid
  VARIANT 945: note = X can be any amino acid
  VARIANT 956: note = X can be any amino acid
  VARIANT 984: note = X can be any amino acid
  VARIANT 988: note = X can be any amino acid
  VARIANT 1022..1023: note = X can be any amino acid
  VARIANT 1027: note = X can be any amino acid
  VARIANT 1032: note = X can be any amino acid
  VARIANT 1041: note = X can be any amino acid
  VARIANT 1094: note = X can be any amino acid
  VARIANT 1110: note = X can be any amino acid
  VARIANT 1154: note = X can be any amino acid
  VARIANT 1208: note = X can be any amino acid
  VARIANT 1211: note = X can be any amino acid
  VARIANT 1216: note = X can be any amino acid
  VARIANT 1220: note = X can be any amino acid
  VARIANT 1228: note = X can be any amino acid
MEVEDNFSSFTNLYEISKTLRFELKPVGETQNNLKLDXIIQKDREIEENYVLIKDLLDDLHILFVEKSLENVNLEFLDEFYNCYIEYKKDSKNKKNISNLEKITKNIRKELISFFVNEXNSWLQKYDFLKKXXIXFLTEKEVLKLLKELNPDKSEIIEKFDRFFTYFSNFNESRKNFYAEDGRAXSISTRAIDENLITFIENIEKFKNFYGENEDWVNNNFSKKEKEIFELDFYNICLLQKXIDNYNKIIXXYSEENXNKIAXINEKINLYKQDKNHNNSKDKKFPKFDLLYKQILSKVDKKDFIIAIEDNKELFEVLEKSKKISLEKVKKFDNLFTEFFDKNINYNLENIYISKVXINTISNKFFENWDSFKLYLGENKKDFINFSQIKIALEKVEEKSIFKEKYYKDNIAFKEKNNYKNFLNIFRFELKINISEINKKLXNSEELNVENFKKXKKQINYIKNFMDSIMDFYKMIKYFNIVKNKKKVEQYEKDGNFYNEYDNNFIDFEIWKDYNLVRNYLSKKDIKTDKFKLNFDNSQFLIGWDKDKEKERYXVILKKDQKYFLXILKKXFHVIFSDYEYQNEEEYYEKMEYKQNPXASKMFPKCSTQLKDVKKHFQSSSEDYILNSKSFISPLIITKKIFDLNNIKYDKNDITKLDEKNXIKKFQKEYLKISXDENXFKESLNLWINFCKDFSQKYKTWQSFDFSNIKKSIDYNSLDEFYLDIEKASYNLDFRKISSNFIKEQVEEXNFYLFQIYNKDFSPFKKSXTNENIHTKYFKLLFDEQNLENLKIKLSXXAEIFFRDKTKNLKQRVRKVKDSQXQNEEKIFYKDKNXEKQKVLEHRRYADDKILFHISVTLNANAXDKYKFNSFINERFINKNKDVKIIXIDRXEKHLAYYSVIDKDXQIIETDTLNVIKSKDXKKTDYLKLLEQKQKSRADXRLSWXEIENIKELKNXYISQVVYKLVELIIEHNAIIVFEDLNSXFKRXRQKIEKQIYQKLELALAKKLNYLTFKDRKNNEIXXYLNXIQLVXKVNDYSDIXNYKQSGIVFYTNPAYTSTTCPICGWRKTLKFPRNLSKQSILNFFENIEINFDXEKFSFTYSYFNKKKKXNIEKEFIVYSNVKRIKYDRKRMENFEVDINEKLLELFNEFDLNXNINNQLQEKELPVDNFLKPLFYCFKDINQIRNSDSNSNKDIISCPSCLYNSDDXFQXKEFNXDANXAYNIARKXLIILENIDVNPDKPNLFISESDWDNFLNKSK

SEQ ID NO: 3228 - protein, 1245 aa, unidentified
MQEHKKISHLTHRNSVQKTIRMQLNPVGKTMDYFQAKQILENDEKLKENYQKIKEIADRFYRNLNEDVLSKTGLDKLKDYAEIYYHCNTDADRKRLDECASELRKEIVKNFKNRDEYNKLFNKKMIEIVLPEHLKNEEEKEVVASFKNFTTYFTGFFTNRKNMYSDGEESTAIAYRCINENLPKHLDNVKAFEKAISKLSKNAIDDLDATYSGLCGTNLYDVFTVDYFNFLLPQSGITEYNKIIGGYTTSDGTKVKGINEYINLYNQQVSKRDKIPNLKILYKQILSESEKVSFIPPKFEDDNELLSAVSEFYANDETFDGMPLKKAIDETKLLFGNLDNSSLNGIYIQNDRSVTNLSNSMFGSWSVIEDLWNKNYDSVNSNSRIKDIQKREDKRKKAYKAEKKLSLSFLQVLISNSENDEIREKSIVDYYKTSLMQLTDNLSDKYKEAAPLFSENYDNEKGLKNDDKSISLIKNFLDAIKEIEKFIKPLSETNITGEKNDLFYSQFTPLLDNISRIDILYDKVRNYVTQKPFSTDKIKLNFGNSQLLNGWDRNKEKDCGAVWLCRDEKYYLAIIDKSNNSILENIDFQDCDESDCYEKIIYKLLPGPNKMLPKVFFSEKCKKLLSPSDEILKIRKNGTFKKGDKFSLDDCHKLIDFYKESFKKYPNWLIYNFKFKKTNEYNDIREFYNDVASQGYNISKMKIPTSFIDKLVDEGKIYLFQLYNKDFSPHSKGTPNLHTLYFKMLFDERNLEDVVYKLNGEAEMFYRPASIKYDKPTHPKNTPIKNKNTLNDKKTSTFPYDLIKDKRYTKWQFSLHFPITMNFKAPDKAMINDDVRNLLKSCNNNFIIGIDRGERNLLYVSVIDSNGAIIYQHSLNIIGNKFKGKTYETNYREKLATREKDRTEQRRNWKAIESIKELKEGYISQAVHVICQLVVKYDAIIVMEKLTDGFKRGRTKFEKQVYQKFEKMLIDKLNYYVDKKLDPDEEGGLLHAYQLTNKLESFDKLGTQSGFIFYVRPDFTSKIDPVTGFVNLLYPRYENIDKAKDMISRFDDIRYNAGEDFFEFDIDYDKFPKTASDYRKKWTICTNGERIEAFRNPTNNNEWSYRTIILAEKFKELFDNNSINYRDSDDLKAEILSQTKGKFFEDFFKLLRLTLQMRNSNPETGEDRILSPVKDKNGNFYDSSKYDEKSKLPCDADANGAYNIARKGLWIVEQFKKSDNVSTVEPVIHNDKWLKFVQENDMANN

SEQ ID NO: 3229 - protein, 1245 aa, unidentified; identical to SEQ ID NO: 3228

SEQ ID NO: 3230 - protein, 1285 aa, unidentified
  VARIANT 1279: note = X can be any amino acid
MPININKFSDECRKIDFFTELYNIQKTLRFSLIPIGATADNFDFKDRLSKEKDLLDSAKRIKEYISKYLADESDKCLSQPIKLKHLDEYYELYITKDRDEQKFKSAEEKLRKELADFLKEILKRLNKKILNDYLPEYLEDDEKALEDIAKLSSFSTYFNSYYDNCKNMYTDKEQSTAIPYRCINDNLPKFIDNMKAYEKALEELKPSDLEELRNNFKGVYDTTVDDVFTLDYFNCVLSQSGIDTYNAIIGNDKVKGINEYINLHNQTAQQGHKVPNLKRLYKQIGSQKKTISFLPGKFESDNELLKAVYDFYNTGNAEKNFTALKETITEFQNIFDNLSEYNLDGVFVRNDISLTNLSQNMFNDWSVFRNLWNDRYDKVNNPEKAKDIDKYNDKRCNVYKKSESFSINQLQELIATSLEENINSKKITDYFSCDFHRCTAEVENKYQSVKDLLSTDYPEKKSLKTSEKDVALIKDFLDSVKSLESFVKILTGTGKESDKDELFYGSFTKWFDQLRYIDKLYDKVRNYITEKPYSLDKIKLSFDNPQFLGGWQHSKETDYSAQLFMKDGLYYLGVMDKETKREFKTQYNAPENDSDTMVKIEYNQIPNPGRVIQNLMLVDGKIVKKNGRKNADGVNVVLEELKNQYLPENINRIRKTESYKTTSDNFNKDNLKEYLEYYIERTKEYYCKYNFVFKSADEYGSFNEFVDDVNNQAYQITKVKVSEKQLLSLVEQGKLYLFKIHNKDFSEYSKGKKNLHTMYFQMLFDDRNLENLVYKLQGGAEMFYRPASIKKDSEFQHDANVEIIKRTCEDKVKDKDNPTDDEKAKYYSKFNYEIVKNKRFTKPQFSLHLTLAMNCNQPDHYWLNNSVRELLKKSNKNNIIGIDRGERNLIYVTIINSDGVIVDQINFNIIENSYNGKKYKTDYQKKLNQREEDRQKARKTWKTIETIKELKDGYISQVVHQICKLIVQYDAIVVMENLNGGFKRGRTKVEKQVYQKFETMLINKLNYYVDKGTDYKECGGLLKAYQLTNKFETFERIGKQSGIIFYVDPYLTSKIDPVTGFANLLYPKYETIPKTHNFISNIDDIRYNRSEDYFEFDVDYDKFPQGSYNYRKKWTICSYGNRIKYYKDSRNKPASRVVNITEKFKETFNNAGIDFVNDNIKEKLLLVNSKELLKSFMDTLKLTVQLRNSEINSDVDYIISPVKDRNGNFYYSENYKKSNEEVPTQPQDGDANGAYNIARKGLMIINNLKNTDDVTNNELLKISKKEWLEFAQKGDLGEXKPYCYF

SEQ ID NO: 3231 - protein, 1285 aa, unidentified; identical to SEQ ID NO: 3230
  VARIANT 1279: note = X can be any amino acid

SEQ ID NO: 3232 - protein, 1255 aa, unidentified
  VARIANT 1246: note = X can be any amino acid
MTLTIKYKESKNKREVYMSNLYSNLHNLYQVQKTLRFELKPQGKTKENMEKVGILEADEHRAEIYSKVKKYCDEYHKLFIDKSLGNIELNGIDRYYELYSINNRDDKQKEELDQLEASLRKQISDAFKKSAEYKGLFQKDIITSYLVTMYKENQEKMQDIGEFNRFTTYFTGYNKNRENMYSEEDKSTAISYRLINENLPTFIDNIKIYKKIVSLMPEDIEKIYKDLEEYIQVDSIDEIFNISYYNDVLTQRGIECYNILISGRTKNDGDKIKGLNEYINEFNQTHNEKIPKLQELSKQILSDAESASFKIDVIKNDKELMNLIEVYYANILPILNKIEDLFTRISNYNLELILVNNDGTLSTFSNMVFNEWSYIKGAISEKYDEKYSGKEKYGTEKYAQKKQEYLKKQKIYSLKFLNDCIGNNAICEYLKNYIIQNKNIETIKEDYNEVQNIKVEDDTKELIKDEKSIEKIKKFLDDVKSLQEFVKLVIPKDRTVEKDAKFYSELTPYYEKIKEIIPLYNKVRNYVTQKPYSTEKIKLNFECPTLLNGWDANKEEANLGVILIKEGKYYLGIINPYCKKIFEVDEKDSNEQNNYKKMEYKLLPGPNKMLPKVFFSNSRIEEFNPSKELQEKYNKGYHKKGKDFDINFCHELIDFYKQSLNKHEDWKKFNFKFKDTSEYNDISEFYREVEKQGYKIEYTEYSEKYINELVDRGELYLFQIYNKDFSEYSKGKENLHTLYWKAVFDPDNIMNPVYKLNGNAEVFYRKKSLEMKVIHPANQPIANKNISTIEAGRSTSTFKYDLIKDKRYTMDKFQFHVPITVNFKSERLFNINQIVNKYLKYNDDIHVIGIDRGERNLLYVCVIDKNEKIVYQKSLNEIVSEYNNNRYTTDYHGLLDRKEKEREIAREDWKNIENIKELKEGYMSQVIHILVELMKKYNAIIVIEDLNKGFKNSRIKVEKQVYQKFEKMFIDKLNYLVFKDEDKMNEGGVLNAYQLTNKFESFTKLGKQSGILYYIPAWCTSKIDPTTGFINRFYLKYENFDKSKEFVNRIDDIRYNEKENLFEFDIDYSKFTDRLNDTKNKWTLCSYGERILTQKNANGEWLDRRIQLSIEFKKLFEKYGINLNNIKDSILKLDKDNLEFYKGNGESLGFIQLFKLMVQMRNSLTGKEEDNLISPVKNRHGKFFNTSEKIEGLPIDADANGAYNIARKGFMLVEQMKNVEDEKLNKIKYNITEKEWLNYVQNRGMXWKRQYLYHI

SEQ ID NO: 3233 - protein, 1285 aa, unidentified
  VARIANT 1279: note = X can be any amino acid
MPININKFSDECRKIDFFTDLYNIQKTLRFSLIPIGATADNFDFKDRLSKEKDLLDSAKRIKEYISKYLADESDKCLSQPIKLKHLDEYYELYITKDRDEQKFKSAEEKLRKELADFLKEILKRLNKKILNDYLPEYLEDDEKALEDIANLSSFSTYFNSYYDNCKNMYTDKEQSTAIPYRCINDNLPKFIDNIKAYEKVLEELKPSDLEELRNNFKGVYDTTVDDMFTLDYFNCVLSQSGIDTYNAIIGNDKVKGINEYINLHNQTAQQGHKVPNLKRLYKQIGSQKKTISFLPGKFESDNELLKAVYDFYNTGNAEKNFTALKDTITELEKIFDNLAEYNLDGVFVRNDISLTNLSQNMFNDWSVFRNLWNDRYDKVNNPEKAKDIDKYNDKRRNVYKKSESFSINQLQDLIATSLEENINSKKITDYFSCDFHRCTAEVENKYQLVKELLSTDYPENKSLKTSEKDVALIKDFLDSVKSLESFVKILTGTGKESGKDELFYGNFTKWFDQLRYIDKLYDKVRNYITEKPYSLDKIKLSFDNPQFLGGWQHSKETDYSAQLFMKDGLYYLVVMDKETKREFKTQYNAPENDSDTMVKIEYNQIPNPGRVIQNLMLVDGKIVKKNGRKNADGVNVVLEELKNQYLPENINRIRKTESYKTTSDNFNKDNLKEYLEYYIARTKEYYCKYNFVFKSADEYGSFNEFVDDVNNQAYQITKVKVSEKQLLSLVEQGKLYLFQIYNKDFSEYSKGKKNLHTMYFQMLFDDRNLENLVYKLQGGAEMFYRPASIKTDSEFQHDANVEIIKRTCEDKVKDKDNPTDDEKAKYYSKFNYEIVKNKRFTKPQFSLHLTLAMNCNQPDHYWLNNSVRELLKKSNKNNIIGIDRGERNLIYVTIINSDGVIVDQINFNIIENSYNGKKYKTDYQKKLNIREKERQEARKTWKTIETIKELKDGYISQVVHQICKLIVQYDAIVVMENLNGGFKRGRTKVEKQVYQKFETMLINKLNYYVDKGTDYKECGGLLKAYQLTNKFETFEKIGKQSGIIFYVDPYLTSKIDPVTGFANLLYPKYETIPKTHNFISNIDDIRYNRSEDYFEFDVDYDKFPQGSYNYRKKWTICSYGNRIQYYKDSRNKPASRVVNITEKFKETFNNAGIDFVNDNIKEKLLLVNSKELLKSFMDTLKLTVQLRNSEINSDVDYIISPVKDRNGNFYYSENYKKSNEEVPTQPQDGDANGAYNIARKGLMIINKLKNTDDVTNNELLKISKKEWLEFAQKGDLGEXKPYCYF

SEQ ID NO: 3234 - protein, 1285 aa, unidentified; identical to SEQ ID NO: 3233
  VARIANT 1279: note = X can be any amino acid

SEQ ID NO: 3235 - protein, 1307 aa, unidentified
  VARIANT 395..401: note = X can be any amino acid
MNKAADNYTGGNYDEFIALSKVQKTLRNELKPTPFTAEHIKQRGIISEDEYRAQQSLELKKIADEYYRNYITHKLNGINNLDFYNLFDAIEEKYKKNDKDNRDKLDLVEKSKRGEIAKLLSADDNFKSMFEAKLITKLLPDYVEQNYIDEDKEKALETIALFKGFTTYFTDYFNIRKNMFKENGGASSICYRIVNVNASIFYDNLKTFMCIKEKAETEIALIEEELTELLDSWRLEHIFSEDYYNELLAQKGIDYYNQICGDVNKHMNLYCQQNKLKANVFKMTKLQKQIMGISEKAFEIPPMYQNDEEVYASFNEFISRLEEVKLTDRLRNILQNINIYNTAKIYINARYYTNVSSYVYGGWGVIDSAIERYLYNTIAGKGQSKVKKIENAKKXXXXXXXSVKELDSIVAEYEPDYFNAPYIDDDDNAVKAFGGQGVLGYFNKMSELLADVSLYTIDYNSDDSLIENKESALRIKKQLDDIMSLYHWLQTFIIDEVVEKDNAFYAELEDICCELENVVTLYDRIRNYVTKKPYSTQKFKLNFASPTLAAGWSRSKEFDNNAIILLRNNKYYIAIFNVNNKPDKQIIKGSEEQRLSTDYKKMVYNLLPGPNKMLPKVFIKSDTGKRDYNPSSYILEGYEKNRHIKSSGNFDINYCHDLIDYYKACINKHPEWKNYGFKFKETNQYNDIGQFYKDVEKQGYSISWAYISEEDINKLDEEGKIYLFEIYNKDLSAHSTGRDNLHTMYLKNIFSEDNLKNICIELNGEAELFYRKSSMKSNITHKKDTILVNKTYINETGVRVSLSDEDYMKVYNYYNNNYVIDTENDKNLIDIIEKIGHRKSKIDIVKDKRYTEDKYFLYLPITINYGIEDENVNSKIIEYIAKQDNMNVIGIDRGERNLIYISVIDNKGNIIEQKSFNLVNNYDYKNKLKNMEKTRDNARKNWQEIGKIKDVKSGYLSGVISEIARMVIDYNAIIVMEDLNKGFKRGRFKVERQVYQKFENMLISKLNYLVFKERKADENGGILRGYQLTYIPKSIKNVGKQCGCIFYVPAAYTSKIDPSTGFINIFDFKKYSGSGINAKVKDKKEFLMSMNSIRYINEGSEEYEKIGHGELFAFSFDYNNFKTYNVSSPVNEWTAYTYGERIKKLYKDGRWLRSEVLNLTENLIKLMEQYNIEYKDGHDIREDISHMDETRNADFICSLFEELKYTVQLRNSKSEAEDENYDRLVSPILNSSNGFYDSSDYMENENNTTHTMPKDADANGAYCIALKGLYEINKIKQNWSDDKKFKENELYINVTEWLDYIQNRRFE

SEQ ID NO: 3236 - protein, 1280 aa, unidentified
MLMPININKFSDECRKIDFFTELYNIQKTLRFSLIPIGATADNFDFKDRLSKEKDLLDSAKRIKEYISKYLADESDKCLSQPIKLKHLDEYYELYITKDRDEQKFKSAEEKLRKELADFLKEILKRLNKKILNDYLPEYLEDDEKALEDIAKLSSFSTYFNSYYDNCKNMYTDKEQSTAIPYRCINDNLPKFIDNMKAYEKALEELKPSDLEELRNNFKGVYDTTVDDVFTLDYFNCVLSQSGIDTYNAIIGNDKVKGINEYINLHNQTAQQGHKVPNLKRLYKQIGSQKKTISFLPGKFESDNELLKAVYDFYNTGNAEKNFTALKETITEFQNIFDNLSEYNLDGVFVRNDISLTNLSQNMFNDWSVFRNLWNDRYDKVNNPEKAKDIDKYNDKRCNVYKKSESFSINQLQELIATSLEENINSKKITDYFSCDFHRCTAEVENKYQSVKDLLSTDYPEKKSLKTSEKDVALIKDFLDSVKSLESFVKILTGTGKESDKDELFYGSFTKWFDQLRYIDKLYDKVRNYITEKPYSLDKIKLSFDNPQFLGGWQHSKETDYSAQLFMKDGLYYLGVMDKETKREFKTQYNAPENDSDTMVKIEYNQIPNPGRVIQNLMLVDGKIVKKNGRKNADGVNVVLEELKNQYLPENINRIRKTESYKTTSDNFNKDNLKEYLEYYIERTKEYYCKYNFVFKSADEYGSFNEFVDDVNNQAYQITKVKVSEKQLLSLVEQGKLYLFKIHNKDFSEYSKGKKNLHTMYFQMLFDDRNLENLVYKLQGGAEMFYRPASIKKDSEFQHDANVEIIKRTCEDKVKDKDNPTDDEKAKYYSKFNYEIVKNKRFTKPQFSLHLTLAMNCNQPDHYWLNNSVRELLKKSNKNNIIGIDRGERNLIYVTIINSDGVIVDQINFNIIENSYNGKKYKTDYQKKLNQREEDRQKARKTWKTIETIKELKDGYISQVVHQICKLIVQYDAIVVMENLNGGFKRGRTKVEKQVYQKFETMLINKLNYYVDKGTDYKECGGLLKAYQLTNKFETFERIGKQSGIIFYVDPYLTSKIDPVTGFANLLYPKYETIPKTHNFISNIDDIRYNRSEDYFEFDVDYDKFPQGSYNYRKKWTICSYGNRIKYYKDSRNKPASRVVNITEKFKETFNNAGIDFVNDNIKEKLLLVNSKELLKSFMDTLKLTVQLRNSEINSDVDYIISPVKDRNGNFYYSENYKKSNEEVPTQPQDGDANGAYNIARKGLMIINNLKNTDDVTNNELLKISKKEWLEFAQKGDLGE

SEQ ID NO: 3237 - protein, 1084 aa, unidentified
MNNGTNNFQNFIGISSLQKTLRNALIPTETTQQFIVKNGIIKEDELRGENRQILKDIMDDYYRGFISETLSSIDDIDWTSLFEKMEIQLKNGDNKDTLIKEQAEKRKAIYKKFADDDRFKNMFSAKLISDILPEFVIHNNNYSASEKEEKTQVIKLFSRFATSFKDYFKNRANCFSADDISSSSCHRIVNDNAEIFFSNALVYRRIVKNLSNDDINKISGDMKDSLKEMSLEEIYSYEKYGEFITQEGISFYNDICGKVNSFMNLYCQKNKENKNLYKLRKLHKQILCIADTSYEVPYKFESDEEVYQSVNGFLDNISSKHIVERLRKIGDNYNGYNLDKIYIVSKFYESVSQKTYRDWETINTALEIHYNNILPGNGKSKADKVKKAVKNDLQKSITEINELVSNYKLCPDDNIKAETYIHEISHILNNFEAQELKYNPEIHLVESELKTSELKNVLDVIMNAFHWCSVFMTEELVDKDNNFYAELEEIYDEIYPVISLYNLVRNYVTQKPYSTKKIKLNFGIPTLADGWSKSKEYSNNAIILMRDNLYYLGIFNAKNKPDKKIIEGNTLENKGDYKKMIYNLLPGPNKMIPKVFLSSKTGVETYKPSAYILEGYKQNRHLKSSKDFDITFCRDLIDYFKNCIAIHPEWKNFGFDFSDTSTYEDISGFYREVELQGYKIDWTYISERDIDLLQEKGQLYLFQIYNKDFSKKSTGNDNLHTMYLKNLFSEENLKDIVLKLNGEAEIFFRKSSIKNPIIHKKGSILVNRTYEAEEKDQFGNIQIVRKTIPENIYQELYKYFNDKSDKELSDEAAKLKNVVGHHEAATNIVKDYRYTYDKYFLHMPITINFKANKTSFINDRILQYIAKEKDLHVIGIDRGERNLIYVSVIDTCGNIVEQKSFNIVNGYDYQIKLKQQEGARQIARKEWKEIGKIKEIKEGYLSLVIHEISKMVIKYNAIIAMEDLSYGFKKGRFKVERQVYQKFETMLINKLNYLVFKDISITENGGLLKGYQLTYIPDKLKNVGHQCGCIFYVPAAYTSKIDPTTGFVNIFKFKDLTVDAKREFIKKFDSIRYDSEKKSVLFYI

SEQ ID NO: 3238 - protein, 1245 aa, unidentified
MQERKKISHLTHRNSVKKTIRMQLNPVGKTMDYFQAKQILENDEKLKENYQKIKEIADRFYRNLNEDVLSKTGLDKLKDYAEIYYHCNTDADRKRLNKCASELRKEIVKNFKNRDEYNKLFDKRMIEIVLPKHLKNEDEKEVVASFKNFTTYFTGFFTNRKNMYSDGEESTAIAYRCINENLPKHLDNVKAFEKAISKLSKNAIDDLDATYSGLCGTNLYDVFTVDYFNFLLPQSGITEYNKIIGGYTTNDGTKVKGINEYINLYNQQVSKRDKIPNLQILYKQILSESEKVSFIPPKFEDDNELLSAVSEFYANDETFDGMPLKKAIDETKLLFGNLDNSSLNGIYIQNDRSVTNLSNSMFGSWSVIEDLWNKNYDSVNSNSRIKDIQKREDKRKKAYKAEKKLSLSFLQVLISNSENDEIRKKSIVDYYKTSLMQLTDNLSDKYNEAAPLLNENYSNEKGLKNDDKSISLIKNFLDAIKEIEKFIKPLSETNITGEKNDLFYSQFTPLLDNISRIDILYDKVRNYVTQKPFSTDKIKLNFGNYQLLNGWDKDKEREYGAVLLCKDEKYYLAIIDKSNNRILENIDFQDCDESDCYEKIIYKLLPTPNKMLPKVFFAKKHKKLLSPSDEILKIYKNGTFKKGDKFSLDDCHKLIDFYKESFKKYPKWLIYNFKFKKTNGYNDIREFYNDVALQGYNISKMKIPTSFIDKLVDEGKIYLFQLYNKDFSPHSKGTPNLHTLYFKMLFDERNLEDVVYRLNGEAEMFYRPASIKYDKPTHPKNTPIKNKNTLNDKRASTFPYDLIKDKRYTKWQFSLHFPITMNFKDPDKAMINDDVRNLLKSCNNNFIIGIDRGERNLLYVSVINSNGAIIYQHSLNIIGNKFKGKTYETNYREKLATREKDRTEQRRNWKAIESIKELKEGYISQAVHVICQLVVKYDAIIVMEKLTDGFKRGRTKFEKQVYQKFEKMLIDKLNYYVDKKLDPDEEGGLLHAYQLTNKLESFDKLGTQSGFIFYVRPDFTSKIDPVTGFVNLLYPRYEKIDKAKDMISRFDDIRYNAGEDFFEFDIDYDKFPKTASDYRKKWTICTNGERIEAFRNPSNNNEWSYRTIILAEKFKELFDNNSINYRDSDDLKAEILSQTKGKFFEDFFKLLRLTLQMRNSNPETGEDRILSPVKDKNGNFYDSSKYDEKSKLPCDADANGAYNIARKGLWIVEQFKKADNVSTVEPVIHNDKWLKFVQENDMANN

SEQ ID NO: 3239 - protein, 1245 aa, unidentified; identical to SEQ ID NO: 3238

SEQ ID NO: 3240 - protein, 1010 aa, unidentified
LLNIDNFDLEHIYIANDSGLTSISQQIFGYYDTYTLAIKDQLQRENPNLYDERIDKLYKKEGSFSIAYLNRLVDTKEHITINEYYRLLGSYCREEGKRKDDFFKQIYSAYSDMLYLFSAEHGEIAQSDSDTAVVQKLLEAYKGLQRFIKPLLGHGDEADKDNEFDAKLRKVWDELDIITPLYDKVRNWLSRKIYNPEKIKLYFENNGKLLSGWSDNQTKSDNGTQYGGYIFRKKNEIGEYDFYLGISTDAKLFRRDETICYEDGMYERFDYYHLKPTTLLGKSYIGNYGEDSNAVLSAFNAAITKLHLEKKLVPKDNEKVPTYLKRFKQYYADFYQILMNDDIVVNANKRENSQDSEEVLSAFKNAVTKLHLEKKLVPKDNEKVPTYLKRLKQKYANFYQILMNDVNVVDAYKSMKQHILATLASLIRVPAAIELAAQTDLDIDELIDEIMNLPSESFGYFPVATAAIEEANKREKKPLFLFKMSNKDLSYAAKSSEGLRKSRGTENLHTMYLKALLGMTQNVFSIGSGMVFFRHKTKGLAETTARHKANEFIANKNKLNDKKKSIFAYEIVKNKRFTVDKYLFKLSVKLNYSQPNNNKIDVNSEVREIISNGGIKHIIGIDRGERNLLYLSLIDLKGNIVMQKSLNILKDDHNAKGTDYKGLLTEREGERQDARRNWKKIANIKDLKRGYLSQVVHIISKMMVEYNAIVVLEDLNPGFIRGRQKIERNVYEQFERMLIDKLNFYVDKHKEANETGGLLHALQLTSEFENFKKSEHQNGCLFYIPAWNTSKIDPATGFANLLDTRYTNADKAREFFKKFDAIRYNEDKDWFEFEFDYDNFNQKAHGTRTKWTLCTYGNRLRSSRNPAKQYNRYPELVVLTDEFKRILGEVGIDIHENLKEAICKLEDKKHLEPLMQFMKLLLQLRNSRTNPEEDYILSPVADENGRFYDSRSCGDELPENADANGAYNIARKGLMMIEQIKDAKDLDNLKFDISNKAWLNFAQQKSYKNG

SEQ ID NO: 3241 - protein, 1272 aa, unidentified
MKFDDFKKLYSLSKTLRFEAKPVGSTLKNIIESGLLEEDEHRAQSYVKVKKLIDEYHKVFIDRVLNDGCLTIENKGKKDSLEEYYESYMSKSNDENVSKTFKEIQENLRSVIAKKLTDNNAYANLFGNKLIESYKDKDEKNKIIDSDLIQFINTAEPSQLDSMSQDEAKELVKEFWGFTTYFVGFFDNRKNMYTSEEKSTGIAYRLVNENLPKFIDNMEAFKKAIAKPEIQANMEELYSNFAEYLNVESIQEMFQLDYYNMLLTQKQIDVYNAIIGGKTDEEHDVKIKGINEYINLYNQQHKDEKLPKLKALFKQILSDRNAISWLPEEFNSDQEVLNAIDDCYKRLSENVLGDKVLKSLLCSLDDYNLDGIFVRNDLQLTDISQKMFGNWSVIQSAIMQNIKNVAPARKRKESEEDYEKRISDIFKKADSFSIQYINDCLNEMDNNNLHAVDGYFATLGAVNTPTMQRENLFALIQNAYTDISNLLETPYPENKNLAQDKTNVAKVKALLDAIKSLQHFVKPLLGKGDESDKDERFYGELASLWTELDTVTPLYNMIRNYMTRKPYSEKKIKLNFENPQLLGGWDANKEKDYATIILRRNGMYYLAIMDKDSKKLLGKTMPSDGECYEKMVYKLLPGANKMLPKVFFAKSRINDFKPSKLIVENYNNGTHKKGKNFNINDCHNLIDYFKQSIDKHEDWSKFGFNFSDTSTYEDLSGFYREVEQQGYKLSFTNVSVSFIDKLVDEGKMYLFQIYNKDFSDFSKGTPNMHTLYWKALFDERNLADVVYKLNGQAEMFYRKKSINNTHPTHPANHPIQNKNKDNKKKESVFEYDLIKDRRYTVDKFLFHVPITMNFKSVGSENINQQVREYLQQADDTHIIGIDRGERHLLYLVVIDMQGNIKEQFTLNEIVNEYNGNTYRTNYHDLLDTREEERLTARQSWQTIENIKELKEGYLSQVVHKITQLMVKYHAVVVLEDLNKGFMRGRQKVEKQVYQKFEKMLIDKLNYLVDKKADAAQSGGLLNAYQLTSKFDSFQKLGKQSGFLFYIPAWNTSKIDPVTGFVNLLDTRYQNTEKAKAFFSRFDAIRYNANKDWFEFYLDYDKFCTKAEGTRTRWTLCTQGSRISTFRNAEKNSQWDNLEVDLTREMKSLFEHYHINICGNLKEEICLQTDKAFFTGLLHMLKLTLQMRNSITGTETDYLISPVADENGTFYDSRSCGDTLPKNADANGAYNIARKGLMFIGQIKETKDLANFKYDISNKAWLNFAQQKPYKNE

SEQ ID NO: 3242 - protein, 1245 aa, unidentified
METFSGFTNLYPLSKTLRFRLIPVGETLKHFIDSGILEEDQHRAESYVKVKAIIDDYHRAYIENSLSGFELPLESTGKFNSLEEYYLYHNIRNKTEEIQNLSSKVRTNLRKQVVVQLTKNEIFKRIDKKELIQSDLIDFVKNEPDANEKIALISEFRNFTVYFKGFHENRRNMYSDEEKSTSIAFRLIHENLPKFIDNMEVFAKIQNTSISENFDAIQKELCPELVTLCEMFKLGYFNKTLSQKQIDAYNTVIGGKTTSEGKKIKGLNEYINLYNQQHKQEKLPKMKLLFKQILSDRESASWLPEKFENDSQVVGAMVNFWNTIHDTVLAEGGLKTIIASLGSYGLEGIFLKNDLQLTDISQKATGSWSKISSEIKQKIEVMNPQKKKESYESYQERIDKLFKSYKSFSLAFINECLRGEYKIEDYFLKLGAVNSSSLQKENHFSHILNTYTDVKEVIGFYSESTDTKLIQDNDSIQKIKLFLDAVKDLQAYVKPLLGNGDETGKDERFYGDLIEYWSLLDLITPLYNMVRNYVTQKPYSIDKIKINFQNPTLLNGWDLNKETDNTSVILRRDGKYYLAIMNNKSRKVFLKYPSGTDRNCYEKMEYKLLPGANKMLPKVFFSKSRINEFMPNERLLSNYEKGTHKKSGTCFSLDDCHTLIDFFKKSLDKHEDWKNFGFKFSDTSTYEDMSGFYKEVENQGYKLSFKPIDATYVDQLVDEGKIFLFQIYNKDFSEHSKGTPNMHTLYWKMLFDETNLGDVVYKLNGEAEVFFRKASINVSHPTHPANIPIKKKNLKHKDEERILKYDLIKDKRYTVDQFQFHVPITMNFKADGNGNINQKAIDYLRSASDTHIIGIDRGERNLLYLVVIDGNGKICEQFSLNEIEVEYNGEKYSTNYHDLLNVKENERKQARQSWQSIANIKDLKEGYLSQVIHKISELMVKYNAIVVLEDLNAGFMRGRQKVEKQVYQKFEKKLIEKLNYLVFKKQSFDLPGGLMHAYQLANKFESFNALGKQSGFLFYIPAWNTSKMDPVTGFVNLFDVKYESVDKAKSFFSKFDSIRYNVERDMFEWKFNYGEFTKKAEGTKTDWTVCSYGNRIITFRNPDKNSQWDNKEINLTENIKLLFERFGIDLSSNLKDEIMQRTEKEFFIELISLFKLVLQMRNSWTGTDIDYLVSPVCNENGEFFDSRNVDETLPQNADANGAYNIARKGMILLDKIKKSNGEKKLALSITNREWLSFAQGCCKNG

SEQ ID NO: 3243 - protein, 1259 aa, unidentified
MNYKTGLEDFIGKESLSKTLRNALIPTESTKIHMEEMGVIRDDELRAEKQQELKEIMDDYYRAFIEEKLGQIQGIQWNSLFQKMEETMEDISVRKDLDKIQNEKRKEICCYFTSDKRFKDLFNAKFITDILPNFIKDNKEYTEEEKAEKEQTRVLFQRFATAFTNYFNQRRNNFSEDNISTAISFRIVNENSEIHLQNMRAFQRIEQQYPEEVCGMEEEYKDMLQEWQMKHIYSVDFYDRVLTQPGIEYYNGICGKINEHMNQFCQKNRINKNDFRMKKLHKQILCKKSSYYEIPFRFESDQEVYDALNEFIKTMKKKEIIRRCVHLGQECDDYDLGKIYISSNKYEQISNALYGSWDTIRKCIKEEYMDALPGKGEKKEEKAEAAAKKEEYRSIADIDKIISLYGSEMDRTISAKKCITEICDMAGQISIDPLVCNSDIKLLQNREKTTEIKTILDSFLHVYQWGQTFIVSDIIEKDSYFYSELEDVLEDFEGITTLYNHVRSYVTQKPYSTVKFKLHFGSPTLANGWSQSKEYDNNAILLMRDQKFYLGIFNVRNKPDKQIIKGHEKEEKGDYKKMIYNLLPGPSKMLPKVFITSRSGQETYKPSKHILDGYNEKRHIKSSPKFDLGYCWDLIDYYKECIHKHPDWKNYDFHFSDTKDYEDISGFYREVEMQGYQIKWTYISADEIQKLDEKGQIFLFQIYNKDFSVHSTGKDNLHTMYLKNLFSEENLKDIVLKLNGEAELFFRKASIKTPIVHKKGSVLVNRSYTQTVGNKEIRVSIPEEYYTEIYNYLNHIGKGKLSSEAQRYLDEGKIKSFTATKDIVKNYRYCCDHYFLHLPITINFKAKSDVAVNERTLAYIAKKEDIHIIGIDRGERNLLYISVVDVHGNIREQRSFNIVNGYDYQQKLKDREKSRDAARKNWEEIEKIKELKEGYLSMVIHYIAQLVVKYNAVVAMEDLNYGFKTGRFKVERQVYQKFETMLIEKLHYLVFKDREVCEEGGVLRGYQLTYIPESLKKVGKQCGFIFYVPAGYTSKIDPTTGFVNLFSFKNLTNRESRQDFVGKFDEIRYDRDKKMFEFSFDYNNYIKKGTILASTKWKVYTNGTRLKRIVVNGKYTSQSMEVELTDAMEKMLQRAGIEYHDGKDLKGQIVEKGIEAEIIDIFRLTVQMRNSRSESEDREYDRLISPVLNDKGEFFDTATADKTLPQDADANGAYCIALKGLYEVKQIKENWKENEQFPRNKLVQDNKTWFDFMQKKRYL

SEQ ID NO: 3244 - protein, 1245 aa, unidentified
MQEHKKISHLTHRNSVQKTIRMQLNPVGKTMDYFQAKQILENDEKLKEDYQKIKEIADRFYRNLNEDVLSKTGLDKLKDYAEIYYHCNTDADRKRLDECASELRKEIVKNFKNRDEYNKLFNKKMIEIVLPQHLKNEDEKEVVASFKNFTTYFTGFFTNRKNMYSDGEESTAIAYRCINENLPKHLDNVKAFEKAISKLSKNAVDDLDTTYSGLCGTNLYDVFTVDYFNFLLPQSGITEYNKIIGGYTTSDGTKVKGINEYINLYNQQVSKRYKIPNLKILYKQILSESEKVSFIPPKFEDDNELLSAVSEFYANDETFDGMPLKKAIDETKLLFGNLDNSSLNGIYIQNDRSVTNLSNSMFGSWSVIEDLWNKNYDSVNSNSRIKDIQKREDKRKKAYKAEKKLSLSFLQVLISNSENDEIREKSIVDYYKTSLMQLTDNLSDKYKEAAPLFNESYANEKGLKNDDKSISLIKNFLDAIKEIEKFIKPLSETNITGEKNDLFYSQFTPLLDNISRIDILYDKVRNYVTQKPFSTDKIKLNFGNYQLLNGWDKDKEREYGAVLLCRDEKYYLAIIDKSNNRILENIDFQDCDESDCYEKIIYKLLPTPNKMLPKVFFAKKHKKLLSPSDEILKIYKNGTFKKGDKFSLDDCHKLIDFYKESFKKYPKWLIYNFKFKKTNEYNDIREFYNDVALQGYNISKMKIPTSFIDKLVDEGKIYLFQLYNKDFSPHSKGTPNLHTLYFKMLFDERNLEDVVYRLNGEAEMFYRPASIKYDKPTHPKNTPIKNKNTLNDKKASTFPYDLIKDKRYTKWQFSLHFPITMNFKDPDKAMINDDVRNLLKSCNNNFIIGIDRGERNLLYVSVIDSNGAIIYQHSLNIIGNKFKGKTYETNYREKLATREKDRTEQRRNWKAIESIKELKEGYISQAVHVICQLVVKYDAIIVMEKLTDGFKRGRTKFEKQVYQKFEKMLIDKLNYYVDKKLDPDEEGGLLHAYQLTNKLKSFDKLGTQSGFIFYVRPDFTSKIDPVTGFVNLLYPRYEKIDKAKDMISRFDDIRYNAGEDFFEFDIDYDKFPKTASDYRKKWTICTNGERIEAFRNPAKNNEWSYRTIILAEKFKELFDNNSINYRDSDDLKAEILSQTKGKFFEDFFKLLRLTLQMRNSNPETGEDRILSPVKDKNGNFYDSSKYDEKSKLPCDADANGAYNIARKGLWIVEQFQKADNVSAVEPVIHNDKWLKFVQENDMANN

SEQ ID NO: 3245 - protein, 1224 aa, unidentified
MQLNPVGKTMDYFQAKQILENDEKLKEDYQKIKEIADRFYRNLNEDVLSKTGLDKLKDYAEIYYHCNTDADRKRLNECASELRKEIVKNFKNRDEYNKLFNKKMIEIVLPQHLKNEDEKEVVASFKNFTTYFKGFFTNRKNMYSDGEESTAIAYRCINENLPKHLDNVKVFEKAISKLSKNAIDDLDATYSGLCGTNLYDVFTVDYFDFLLSQSGITEYNKIIGGYTTSDGTKIKGINEYINLYNQQVSKRDKIPNLKILYKQILSESEKVSFIPPKFEDDNELLSAVSEFYANDETFDGMPLKKAIDETKLLFGNLDNSSLNGIYIQNDRSVTNLSNSMFGSWSVIEDLWNKNYDSVNSNSRIKDIQKREGKRKKAYKAEKKLSLSFLQVLISNSENDEIRKKSIVDYYKTSLMQLTDNLSDKYKEAAPMFSENYDNEKGLKNDDKSISLIKNFLDAIKEIEKFIKPLSETNITGEKNDLFYSQFTPLLDNISRIDILYDKVRNYVTQKPFSTDKIKLNFGNYQLLNGWDKDKEREYGAVLLCKDEKYYLAIIDKSNNRILENIDFQDCDESDYYEKIVYKLLTKISGNLPRVFFSEKHKELLSPSDEILKIYKNGTFKKGDKFSLDDCHKLIDFYKESFKKYPKWLIYNFKFKKTNEYNDIHEFYNDVALQGYNISKMKIPTTFIDKLVDEGKIYLFQLYNKDFSPHSKGTPNLHTLYFKMLFDERNLEDVVYKLNGEAEMFYRPASIKYDKPTHPKNTPIKNKNTLNDKKTSAFPYDLIKDKRYTKWQFSLHFPITMNFKALDRAMINDDVRNLLKSCNNNFIIGIDRGERNLLYVSVIDSNGTIIYQHSLNIIGNKFKGKTYETNYREKLSTREKERTEQRRNWKAIESIKELKEGYISQAVHVICQLVVKYDAIIVMEKLTDGFKRGRTKFEKQVYQKFEKMLIDKLNYYVDKKLDPDEEGGLLHAYQLTNKLESFDKLGMQSGFIFYVRPDFTSKIDPVTGFVNLLYPRYEKTDKAKDMISRFDDIRYNAGEDFFEFDIDYDKFPKTASDYRKKWTICTNGERIEAFRNPANNNEWSYRTIILAEKFKELFDNNSINYRDSDDLKAEILSQTKGKFFEDFFKLLRLTIQMRNSNPETGEDRILSPVKDKNGNFYDSSKYDEKSKLPCDADANGAYNIARKGLWIVEQFKKSDNVSTVEPVIHNDKWLKFVQENDMANN

SEQ ID NO: 3246 - protein, 1227 aa, unidentified
MKEQFINCYPLSKTLQFSLIPVGKTEDNFNKKLLLERDKQRAENYEKVKGYIDRFHKEYIESVLVNARVEKIDEYADLYWKSNKDDSDAKAMESLENDMRKQISKQLKSNARYKRLFGKELICEDLPSFLTDKDERETVECFRSFTTYFKGFNTNRENMYSSDEKSTAIAYRCINDNLPRFLDNVKSFQKVFDNLSDETITKLNTDLYNTFGRNIEDIFSVDYFEFVLAQSGIDIYNSMIGGYTCSDGTKIQGLNECINLYNQQAAKNEKSKRLPLMKQLYKQILSEKDSVSFIPEKFNSDNEVLLSIEDYYSSHIGDFDLLTELLQSLNTYNANGIFVKSGAAVSDISNSAFNSWNVLRLAWNEKYEVLHPVTSKTKLDNYIEKRDKIYKAIKSFSLFELQSLGNENGNEITDWYISSTKECNSKIKEAYLQARELLKSDYEKSYNKRLSKNGKATELVKNLLDAIKDFQHLVKSLNGTGKEENKDELFYGKLTSYYDSIADIDKLYDKVRNYITQKPYSKDKIKLNFDNPQLLGGWDKNKESDYRTVLLRKDDFYYLAVMDKSHSKAFVDAPNKTSEDEDYYEKMEYKLLPGPNKMLPKVFFAAKNIDTFQPSDRILDIRKRESFKKGATFNKSECHEFIDYFKNSIEKHDDWSQFGFEFTPTENYNDISEFYREISDQGYSVSFNKISKSYVDELVNNGYIYLFQIYNKDFSKYSKGTPNLHTLYFKMLFDERNLSNVVYKLNGEAEMFYREASINDKEKITHQANQPIKNKNPDNEKKESTFEYDIIKDKRFTKRQFSLHVPITINFKAHGQEFLNYDVRKAVKYKDDNYVIGIDRGERNLIYISVIDSNGKIVEQMSLNEIISDNGHRVDYQKLLDTKEKERDKARKNWTSVENIKELKEGYISQVVHKICELVVKYDAVIAMEDLNFGFKRGRFPVEKQVYQKFENMLISKLNLLIDKKADPTEDGGLLRAYQLTNKFDGVNKGKQNGIIFYVPAWDTSKIDPVTGFVNLLKPKYTSVSEAKKLFETIDDIKYNANTDMFEFCIDYGKFPRCNSDYKKTWTVCTNSSRILTCRNKEKNNMWDNKQIVLTDEFKSLFGEFGIDYKGNLKTSILSISNADFYRRLIKLLSLTLQMRNSITGSTLPEDDYLISPVANDRGEFYDSRNYKGTNAALPCDADANGAYNIARKALWAINVLKSTPDDMLNKANLSITNAEWLEYTQK

SEQ ID NO: 3247 - protein, 1284 aa, unidentified
MKGLMLMPININKFSDECRKIDFFTDLYNIQKTLRFSLIPIGATADNFDFKDRLSKEKDLLDSAKRIKEYISKYLADESDKCLSQPIKLKHLDEYYELYITKDRDEQKFKSAEEKLRKELADFLKEILKRLNKKILNDYLPEYLEDDEKALEDIANLSSFSTYFNSYYDNCKNMYTDKEQSTAIPYRCINDNLPKFIDNIKAYEKVLEELKPSDLEELRNNFKGVYDTTVDDMFTLDYFNCVLSQSGIDTYNAIIGNDKVKGINEYINLHNQTAQQGHKVPNLKRLYKQIGSQKKTISFLPGKFESDNELLKAVYDFYNTGNAEKNFTALKDTITELEKIFDNLAEYNLDGVFVRNDISLTNLSQNMFNDWSVFRNLWNDRYDKVNNPEKAKDIDKYNDKRRNVYKKSESFSINQLQDLIATSLEENINSKKITDYFSCDFHRCTAEVENKYQLVKELLSTDYPENKSLKTSEKDVALIKDFLDSVKSLESFVKILTGTGKESGKDELFYGNFTKWFDQLRYIDKLYDKVRNYITEKPYSLDKIKLSFDNPQFLGGWQHSKETDYSAQLFMKDGLYYLGVMDKETKREFKTQYNAPENDSDTMVKIEYNQIPNPGRVIQNLMLVDGKIVKKNGRKNADGVNVVLEELKNQYLPENINRIRKTESYKTTSDNFNKDNLKEYLEYYIARTKEYYCKYNFVFKSADEYGSFNEFVDDVNNQAYQITKVKVSEKQLLSLVEQGKLYLFQIYNKDFSEYSKGKKNLHTMYFQMLFDDRNLENLVYKLQGGAEMFYRPASIKTDSEFQHDANVEIIKRTCEDKVKDKDNPTDDEKAKYYSKFNYEIVKNKRFTKPQFSLHLTLAMNCNQPDHYWLNNSVRELLKKSNKNNIIGIDRGERNLIYVTIINSDGVIVDQINFNIIENSYNGKKYKTDYQKKLNIREKERQEARKTWKTIETIKELKDGYISQVVHQICKLIVQYDAIVVMENLNGGFKRGRTKVEKQVYQKFETMLINKLNYYVDKGTDYKECGGLLKAYQLTNKFETFERIGKQSGIIFYVDPYLTSKIDPVTGFANLLYPKYETIPKTHNFISNIDDIRYNRSEDYFEFDVDYDKFPQGSYNYRKKWTICSYGNRIQYCKDSRNKPASRVVNITEKFKETFNNAGIDFVNDNIKEKLLLVNSKELLKSFMDTLKLTVQLRNSEINSDVDYIISPVKDRNGNFYYSENYKKSNEEVPTQPQDGDANGAYNIARKGLMIINKLKNTDDVTNNELLKISKKEWLEFAQKGDLGE

SEQ ID NO: 3248 - protein, 1254 aa, unidentified
MLGEFLADYFSPVSLDDDEEAKTTTESTSATEQLEFRKWARGWLSFQWGTGKKSDNTQIASLLAKLSNASLDHLIGSSGEQLIAHLTEILGDAAPKDESDESMNCLRKLVGWKTGRSSKGKMALEMAQQKQILSTADIDVLKKKLSEEAEEKNKNAHRTTQEWARNLRMTIEEMTGVPFISGRNLIGEFAVMLDHAARRVSLAHTWIKRAEAERRRFEEDAAKIDGVPEDARKWLDRYCKDRSLSSGALESYRIRKRAKEGWKEVVAAWSRKECRTEKDRIEAAREVQADVEKFGDIQLFEAAAVEDAVCVWKQDGRASPAFLSDYVVARDAGAKQLRFKVPAYRHPDPLRHPVFCDFGNSRWEIKFNIHEMRKRDAKNSREKKVERIDLQGMSMGLWDGASVSKQPLRWRSKRFTADLVLPKAGGTGETQCVSRADRLGRGASAGDKNSSIRILQVFDEKEWNGRLQVPRAQLDDLANHLHSNGNQWDPRACRMRDRLRWLVSFSAKLQPQGPWSAFAERNGLRPDWKYWPHAVDNKKRQGLARLMLSRLPGLRVLSVDLGHRYAAACAVWETVSEEQIRRACAAVGTVAPAEGDLYLSAKAVNNGKTRTTVYRRIGANVLPDGKRHPAPWARLDRQFLIKLQGEDVGARKASSTEIAEVDKLEEDLGFKRSVLRKGSELAVDELMHESVRLLRLALRRHSDCARISFNLTSKDKLLSGDREEALDPESRMELVTDMLTLWRELFRSDRWTDEWAKNQWQDHIQPSLGDVELPEVSEEANETAQKRKKHDEELRLGLRRAADKLASNPSLCVKLNILWAARWQEEDKQWRPRLRWIRDWLMPRGVGRNGKTHQSIRHVGGLSLSRIATFKSLYQLEKSFKMRPEPDDLRKNVPKPGDESARQFGQRILDAMEGMRENRVKQLASRIAEAALGIGSEERAKDGRQSKRPQQRISAPQFAPCHAVVIENLTRYRPEETRTRRENQQLMTWSSSKVKKYLSEACELNGLHLREVPAAYTSKQDSRTGAPGIRCKDVPVKDFLESPFWNMQITAADQKMRDGSKGDARERYLLALRTQWGTMPDVKKAGRSIRIPYRGGEVFVSAQKTSPASSGLQADLNAAANIGLKALLDPDWSGRWWYVPCDAETYRPIKDKVVGCLAIKPTEPLIQVKGENGQSSDAHTPRRTRNAERRIGSQRESKHNIVNLWRDISAEPVNNERATGSEWRSYSEYWSKVQFRVVNILREQAGLPRDSLPS

SEQ ID NO: 3249 - protein, 1512 aa, unidentified
MAVRGQEEMATENGKEQPSVTTQRAYTLRLCGLDKHDNTWRDRLWNTHEAVNKGAKAFGDWLLTMRGGLCHTLAEADVPGVGKKPARNPTQQEIKNRRIVLALSWLSVESIHGAPKSLLVSHDLDMATGERRNWQTVEALREILQRRDLCEEQINQWTIDCRDSLSAKIREDAVWVNRSKAFDMATTKIGASLSREDIWDFLQPFFGSKYSYLNMKTAVTTTSEDSEADAEESKDESSEEKAKDLSQKAGQWLSSRFGTGTGADFSRFCEVYDAIANHCNNIQAGVSGTEVCESLADALNEFSPRSRSIYGILELISGPGYKSATRNVLQQINNLQSVSQLDLDRVRDASVKDAQQSREKVGGKGSRPYANAVLQDVETACGITYHNTGNGPLHQKQYAVILDHAARRVSMAHSWIKRAEEERGNFEIEKDKLLRVPADARVWLDAFCTRRSSESGAIDSYRIRRSAIDGWKQVVAAWAALPTKAEDKDSVLPSAAESARIQKARELQDTIEKFGDIQLFEALSQADAKCVWLPNGKPDAQPLMDYVAGTDAISKKQRFKVPAYRHPDAFLHPVFCDFGDSRWSINYAVHRAPEKLVRARQLLEKKKEEIVRTEQALSKASDLSKQSSFEEKLRSLNVTFKQQEANVLWLGSRHAMTMGLWNGSHIEDTRLSWQSKRFSSDIGQAGAEYSLEVSRADRFGRAATLAKDNASVVPSGLFDLNDWNGRLQAPRRQLDAIAAIHDRVDLSVEEKRQLIAKRIRAIRWLVTFSAKLQSRGPFISYAAQHGFDWRYGAHGIENKRRQGLAKLVLCRLPGLRILSVDLGHRYAAACAVWETLSAAQMQNVCLDADMEAPGTHALYLHLKQIVNGKEKKTIYRRIGADTLPDGSLHLAPWARLDRQFLIKLQGEDRDARPATSDEVAAVEQLETDLGCLRPIKRKGREHLVDELMSDALRTLRLGLQRHGARARIAFNLTAAKRTRPGGIQELLDQESRIGLLTETLLEWNELYAGERWADELARDMWNKHIQPLLGGTILQETINQDVTPSAARRRKQREETREKLRPVAKQIAENDSLCRQLNVLWSTRWQIDDAAWRMRLRWMRRWLLPRGINRDPQFRKSIRDVGGLSLIRIASFKSFFQVQKSYWMRPHPDDLRRNIPERGDSSLTSFGQRVLDAMEKMRENRVKQLASRIAEAALGIGDETSVNGKDGRRKRPTEISNDPRFAPCHAVVIEDLTHYRPDETQTRRENRQLMSWSSSKVKKYLGEACQLNGLYLREVPPAYTSRQDSRTGAPGLRCNDVTVAEFNTSRFWRKQVEAAEKKQKEGKGDARERYLLSIDEESRSAANDIDVFRIPVKGGEIFVSACRPDGGSNAKRKALSGLQADLNAAANIGLRAIFDPDWEGRWWYIPCDATTFYPVAKKFIGCKAVDSSKPLRIVAEKVAVSSSGIDEKRSGRKGIVPTDGSRIVNLWRDPSGAPIRWDVPSNSEWQDYAEYWNKVQSRVIANLRKSCGLREI

SEQ ID NO: 3250 - protein, 1021 aa, unidentified
LSRSDKNFIETFDEDKAMFETISDFQKAYFDENITSSLVIPTFIKEIKELSNNLINESENIFIAKDKLNNISLALTGSWNSISNQLLAQSTESKFQKASRFSVHEIDNALKHLIENLSSTNDEGNPIKSEYRNLSASSDNLIYDFFNKHLDNLYTATIGSWQKLHGNGVLAEQNIDAAREDENDKGFEQIACIKAFLDNCIALLNFIKDWNLKINETPDEAFTDWYDKIQHFIDNFPIINLYNKTRNYVTKKPYSSDKIKINFEKSTLLDGWDRNKETANFGTILEKDGNFYLAVMTPGFNGVFDYDIAPDESPKKSKEKEVLKKAVIATSGEPSYRKMNYKLLPGPNKMLPKVFFAQKNINFFNPSAEVVNIKEQKLYSKTEIEKHGIENLHKYIDFCKNSLCIHPEWKEAYGFSENSFRKTEEYESVDQFYREVEEKGYKISFDNIKESYIHDNVEKGQLYLFKIYNKDFSTERKKERERRDNLHTSYWKLLFAEENLNDIVLKLNGQAEIFFRKASVKWSEDKMQKGHHHEELKDKFSYPIIKDRRFTQDKFFFHCPITLNHKAPSQPGRFNSKVRQFLKNNPSVNIIGIDRGEKHLLYYSVIKQNGDIIEQGSLNQISNGFIPSGETKAREIDYHQKLEEKEKNRDKARKSWSAIENIKELKAGYLSQVVHKLSQLIIKHNAIVVLEDLNKGFKRGRFKVEKQVYQKFEKALIEKLNYLVFKDRENRLEPGHYLNAYQLTNKFTSFKELGKQSGILFYTIASYTSTTDPVSGFIKNVYNNYSSVAKSIELWESFDSIIYNSEKDRFEFSYTIDKILSKKMEKEKDENQIDRKQWTVVSSVIRSRYVKQTLAEEQKLSADREKIGNKGTYELFSVTEKLKKLFKENNIDYQNENNIQKQLVVRSAKGDSSLHKSCIYYFNAILNMRVTDSQKNTGSDENDFILSPVEPFFDSRKKYQKLPVNGDANGAYNIARKGICLLDKINNAENLDKVNLTVTKRDWQNYTQSQEMLACQIKKMN

SEQ ID NO: 3251 - protein, 1422 aa, unidentified
LWIAPHNASVYLASILQALSQLFYAETGGQIMADQVNSLANFTNQYQVSKTLRFELKPIGETADWIKKNNIIAVEENTLVGKDANKAKHYKYAKRMLDAMHRIFIEDALRLINNIELSQKLTEKFFELQAMDKLQVDKSLKDTFKNILDVAAKRWIEEYQQEMPSFWYADKAELEEKLAIETNNQRKKGFKSAINAVQKNINAPNKVLKNKNLEIMYSNEDALRLLEWKVRSGAVKVTFKELEQNDSDKYIPVIVLREYLRDFYKFSTYFSGFNENRQNVYDLSGEKSTSIINRTVNENLTFHFNNIEKWQTIKKSIDKYADLLNTKEYNWREKLEECEQKLGFKTEEVFTVESFVNFINQSGIDRYNEITGGRPEAGDKKKIQGINEFINLTRQQAGAKRNEFPPMQLLYKQILSKSDKTFINAFEKDSEMFDEIKDFHQKCFVDHEEDALPEVPAFAQNVIDYINEIKQEKENIFIAKDKLRCFSNELTGQWNTIDHRLLSEIGDNVFHKSKYFSLAQIENALEQEIDGVNFASENLKSEYRKHTGNIFLSFLTEKLEQLYLAQKKSWRELDSSGVLNLKELAANREKSGDKGFEQIALIKTFLDDANKLFGFVKDWQVKDSLPENANKAWYELLQGFTDHFPIIELYNKTRNHVTRKPYSTEKLKINFENSTLLDGWDRNKETDNYGILFERDGMYYLGIMTPESNGLFNYEIYDSDSTNKRQSKQKVQDAALARDSENAYRKINYKLLPGPNKMLPKVFFAESNKAIFSPSSEIIKIKDKKLYSKAEIEKHGIQNLHDYIDFCTQSLTIHPEWSKAFGFSEKSFRPSNAYNSVDEFYREVENQGYKITFDNIKASYIEEKVKTGELYLFQIYNKDFSSNKKSQGLDNLHTSYWKLLFSEDNLQNTVLKLNGQAEIFFRKASIKLSEEKKKTGHHYNELKGKFSYPIIKDRRFTEDKFFFHCPISMNFQAPSGPGRFNDKVREFLRNNPDVNIIGIDRGEKHLLYLSVINQNGEILEQFSLNEISTGFVPYGANEERRINYHAKLAEKEKNRDQAQKSWSTIENIKELKAGYLSQVVHKLAQMIIKYNAIVVLEDLNIGFKRGRFKVEKQVYQKFEKALIDKLNYLVFKDRKNSLEPGHYLNAYQLTNQFQSFEKLGKQSGILFYTTASYTSTTDPVTGFLKNVSARYENVGKSLEFWKSFDSIIYNPAKDRFEFTYTLGKVACKSTFKEKNEDKVTRKQWTVCSCVERSRYVNPNIPEDKKQKLDPETLGKLGQHELFCVTDKLKKLFDKKGIDYKTDTDIRKSLLEHVQKHDAELHRQCMYYFSAIMNMRGTDSSKTAGSDENDFIMSPVEPFFDSRNRHAVLPHNGDANGAYNIARKGICILRKIDNSEKSLTITKQDWQEYAQAPQVVKNQHSKL

SEQ ID NO: 3252 - protein, 1343 aa, unidentified
MNNSSFADFTNLYSLSKTLRFELKPVGKTLENMREHLGYDPELQTFLKDQNIEDAYQTLKPVLDALHEEFITKSLESENAKDIDFTEYFEKYKEKSDEKGEKDLRKKIGELYSEGEFFFKEKYASLSFKKGSKPATKNQVLESTDILEVIKKENETDEKIQQALEVFKGFFTYFGGFNQNRANYYETEKEQSTAISHRIIHENLPKFCDNIVFFEKRKEEYLNAYSALKEKNITLQNKEKKDLFPLSEEIFTLQYFSSCFSQSQIEKYNEIIGNANHLINLYNQSHPNNKLVFFKTLYKQIGCGKKKSLFFTVTHDTKEESNKAREEGKEAFSVEEILDLVEKAGEQFYKHNTQNENTVLKLLEYIETKESFEGMYWSKQAINTISHKYFANYHDIKDKLKNNKIFEKTKKGSEEDVKIPDAVELSGLFSVLDTEENWKTLLFKNSITEDFEKQKIIQASETASKALLRMIFSDIKNAIKNFFEEKENIQSLCEYKSKESKAIIKKWLDYTLAIQQMIKYFLVRENKIKGNPIDTLLSEYLKKTIVEPKFQDGTEVDWFRWYDSLRNYLTKKPQDDAKENKLKLNFENSTLAGGWDINKESSNTCVILQDTESKKYLAIMKKGCNTLFQKEWIEGRGKNKSMKKNPLHEISDQCEIFEKMEYKLLPGPNKMLPKCLLPKSDLKKYGANDEILEIYKRKSFQKTEKNFSISDLHKIIDFYKEGIKKYENWNVFDFKYLPTNQYEDIGQFYSTVEKQGYKLSFSKINENVLNSFIEEGKIYLFEIKNQDFNTGKKDGHKNNLHTIYWNALFQEKENRPKLNGEAEIFYRKAVSEKNLKKKIYKGAEIIENYRFSKEKFIFHVPITLNFCLDNKKTNDLINSILSSSPSLHFLGIDRGEKHLAYYSLVNQKGDIVDQGTLNLPFLDTNGNPRTVKSEKRTLSDDDTEKVEEVECKDYNDLLEAKAGDRAYARKNWQTIGTIKELKEGYLSQVVRLVADLSVEHNAFIVLEDLNTGFKRGRQKIEKSVYQKFEVALAKKLNFLVDKTAQSGEVGSVTRALQLTPPVNNYQDIEKKKQVGIMLYTRANYTSQTDPLTGWRKSIYLKTGSEESIKAQILSHFSDIYFDGKDYFFEYEDTVLKKWKLYSGIHGTSLERFRGVRGKDKNEWQIKQIDIVEILDEVFKNCDKNRSLLSQIGDEGIPLAKTASDHTAWESLRFAIELIQQIRNTGLTEQDNDFLLSPVRNENGVHFDSREYLVKEQQGEKVSLPTSGDANGAFNIARKGIIMNAHIKHWIDSGKPKHKDKGSDLNLFVSDEEWDLYLQDKQKWKESIPHFASKKSFEDEKKKH

SEQ ID NO: 3253 - protein, 1364 aa, unidentified
LEVEVIMNRIYQGRVVKVELLTPKNKKGVDPVIRELDQDEGDRLLWDFNCLFQDAVNYYLVCLMAMAKKPDNPLTGIKAGIDGGGPEYEVWAPFRRKGQLRQGLREVAKYFELDPATASFAECCDKALDGNSAPDELIDLALNELLHFCSGGEGKIQQEGRSMFPRFCRPTYQGDYKTGATADLRAYGETRLSTDFHEITDLGGLKAFAQNMQVGWMVNISQRGESFTGEGSRKRLGKALDHFLSAYGGAAAATKRGKRVSDFLKEHPEYQKHLECLKEALKDMPGDQLPELPPNARSIPDRLEAGLIFKFFPSIETAELLKVSYPHVEKPKKQKTSDDDYAAFGDDAVKLARGERGYVFKAFSALPSFGAQDGEPEWIEFDISAFKEALKALHQVEQKGEERKIKQAEIQNLLKCMDGSKAARERFLKTSETEPPPVLKGDPRIERIEAVVKELSRSYEMAEEEESEYTLSWRTIRGFDELAEKWNRIKLDGLSEEEIRARLKEILTALQEAKSSTIGSVELFEKLIEPENRVIWQHSGDHMLAEYVQEGYADNPLEAYVQRREWAEEVGRLGKPVHLTPADPRYSCRQVELGDKNTFKGGHGAYYHENKRLAVVAPLAIREDGIWKPQRVRIHYSAPRFLRDGLRGTEDSLTEAPWQQPMMEALGKDLSFPQDIHNHAVFLMPRKGRDGKIRALLNFPITLDPSKMVGFLGREQRWTGQFAGVKDKHIYLRWPEDNWGKYDGPRWYHNGGSFRVLNIDLGYRDAAGYSIVECGTGQKPSGVTREIGRADGRAWHARVEHMGMLHLPGEDMKVWQKGEFKQEPYGKRGRLALTEETAEAVRWVEELGYGNQFAEDITRRKGLPEQNDLLLVVLRRAIGRLRGWQSLSWKLSRSQERAQARAALQKEDKFSDDLKDLIRQGKWSLVSERLEQEIQKLKEQLSVHFERIANRVLPLKGRRWEWVKRPTEAGYVLRQTERGSDTKPTLIAGQRGLSMKRIEQIEELRRRCQALNRALQHTPGTPPKMGSAMRGQDIADPCPEVLEKLEHMKDQRVDQTAHLILAEALGVRVKPHAKSRRERIQKDVHGEYEKFREPVDFIVLEDLNRYRTSQERSRQENSKLMKWSHRAVLIKIKQLAETYGFPVLEVAAAYSSRFSSRDGCAGFRAREIHAGARDQFPWTKLLNEKEPDAMKLFEMLDAASVGQDESKPRKLLVPSDGGPIFVPMSGKEIQADINASINLGLRAVAAPDAWGIHHRVRTEMDETGRIKPLRKNNREKIRWPADVSCFEFDKPAHLTRQSNCFPVIGFRAEYENCTLNGRSYATGKGLWGTVKEKKWGRIREINESRIQRWREKGLIPPADDIKMS

SEQ ID NO: 3254 - protein, 969 aa, unidentified
VEQKGEERKIKQAEIQNLLKCMDGSKAARERFLKTSETEPPPVLKGDPRIERIEAVVKELSRSYEMAEEEESEYTLSWRTIRGFDELAEKWNRIKLDGLSEEEIRARLKEILTALQEAKSSTIGSVELFEKLIEPENRVIWQHSGDHMLAEYVQEGYADNPLEAYVQRREWAEEVGRLGKPVHLTPADPRYSCRQVELGDKNTFKGGHGAYYHENKRLAVVAPLAIREDGIWKPQRVRIHYSAPRFLRDGLRGTEDSLTEAPWQQPMMEALGKDLSFPQDIHNHAVFLMPRKGRDGKIRALLNFPITLDPSKMVGFLGREQRWTGQFAGVKDKHIYLRWPEDNWGKYDGPRWYHNGGSFRVLNIDLGYRDAAGYSIVECGTGQKPSGVTREIGRADGRAWHARVEHMGMLHLPGEDMKVWQKGEFKQEPYGKRGRLALTEETAEAVRWVEELGYGNQFAEDITRRKGLPEQNDLLLVVLRRAIGRLRGWQSLSWKLSRSQERAQARAALQKEDKFSDDLKDLIRQGKWSLVSERLEQEIQKLKEQLSVHFERIANRVLPLKGRRWEWVKRPTEAGYVLRQTERGSDTKPTLIAGQRGLSMKRIEQIEELRRRCQALNRALQHTPGTPPKMGSAMRGQDIADPCPEVLEKLEHMKDQRVDQTAHLILAEALGVRVKPHAKSRRERIQKDVHGEYEKFREPVDFIVLEDLNRYRTSQERSRQENSKLMKWSHRAVLIKIKQLAETYGFPVLEVAAAYSSRFSSRDGCAGFRAREIHAGARDQFPWTKLLNEKEPDAMKLFEMLDAASVGQDESKPRKLLVPSDGGPIFVPMSGKEIQADINASINLGLRAVAAPDAWGIHHRVRTEMDETGRIKPLRKNNREKIRWPADVSCFEFDKPAHLTRQSNCFPVIGFRAEYENCTLNGRSYATGKGLWGTVKEKKWGRIREINESRIQRWREKGLIPPADDIKMS

SEQ ID NO: 3255 - protein, 1422 aa, unidentified
MADTTTRAYTLRIQGDRLALWRNHVIFNRGVRAWGEWLLNLRGGLPASLADDEKLREVATSEVERGIKERMAGINPVTIRQDPAFADLTDRAIRAEVKARKTLVTEFAVRTELTSARRSELRRILALSWLCPETPVGLVPDAAVVATADDHDREVKVLDRFRQILKRKGVTEIAGWLEDCGGTLRAGIRPDATWVDRSECFRAMPKALRPTEEDAAKHLFRLFGSASDYFATSGTTGAPAEPKDFGPVCRTWVVDFWGGGDKASKAQIIASLSAIAKIDPSLVVGKRGPVALAAIAGVLKPRPADASVKALARAIGWLSGSPSAARLAIDAIAISPRVPKKLWDRLVLACEKDCGRQKSKLAFAGSASKVASALEPQLAGLTGMPYAATREKSGEYGTMLAFAMRRVSQIHTKAKQAEAERQSFGAEKRRMKLVPAAAKEWLEEYVEARSASSGAVDGYQLRTRAVSGWRDVVAAWGDCKTSDDRVAAVRELQADWDKAGDVQLFEALAAEAAVCVWRSADGEGVASILEDFVRAIEADHKALRFKVPSYRHPDPLRSPAFIGFGKSQWSISYSAQTEARERKKLLDRTAKPGPAAERAKEALAKQPVLQDVSMDLWVGERLQSCTYRWQSGRFLNDLALHSIQAMAGERVTRATRLGRSRLPNSPVLVDGISDDAPWNGRLQAPRRELEDLARALKAKGLPYDDESKWPRKLQRRLRHLGWFLTHSAKLTPSGPWLDYVANGLANDWQWANGRDGAYLFREDNKSRKGRAKLILSRLPGLRVLSIDLGLRTSAAAAVWHVVSKRELTAAKVSAQRVTETDLYCLVHANERTQVFRRIGPAAWARLDRQFLIRLDGEKASARSATPEEWKRLQDFRSWLGCGIEASPQTLPAVDCLHRAAERLCRLGLRRLSDLARVAFLLTAKDRPGMGGRMEPLDTEGRITAAQDALAIWHSLASSEEFVDERLRALWFANVGDSPALQGRLTKKQRQEVRESLRTAAEKLCGNVALGRELATVWQERSTKWAGWLRWLRDWVIPRFDKRINGERVRAARNVGGLSLDRIATIRGVYQVMRAYASRPEPTNLRAGVERLEKAAAQKLRPEFGRRMLAKMERLRENRAKQIASRIVEAALGVGSENRMHWARGRKRPAAVIADPRFAPCHAVVIENLDNYRPDDKRTRRENRGLMTWAAHAIGKYLAEGCELHGLYLRQVSPSYTSRQDSRTGCPGLRCNDVAVRDLENPEAWLSNAIARAEEAVRDGKATPRQELLAALADAARGKRLDSPAVRIVAPGGQLFVAADPESPAAAGIHADLNAAANIGLVALLDPDWPASWWRLPCKTSTGEVDETKVAGAEAVPNGRSILEAGLETGRGIVNAWSDPADGAVSRRTWSDSKQYWRDVERRVVEVLRWWNGGRIRRGAVPF

SEQ ID NO: 3256 - protein, 1426 aa, unidentified
MADTTTRAYTLKLKGDRLALWRNHVIFNRGVRAWGEWVLNLRGGLPALLADQKELLAVEEKHIASAVKDRTAAITSAAIRQDPTFEAASDKRVREEVATRKKRITEAVVKRDLLAARRSELRRILALSWLCPETPVQLAPQAAIVAGADASDREKKVLDRFRKILKQKGVDDVAGWLQDCDATLRAAIRSDAVWVDRTACFRAMPAAVRPSEIDAAKHLFRLFGSASGYFATPNAGGGPTEPKDFANTCRDWVSSFWGGGEKASKTKILTALSTIGRINPAHVVGKRGPAALAVIAGVLKQKPADDSVEALARAIGWLSGRPSAARLAIDAIAISPRVTQKLWNRLVLACEKDGGRHKSNLAFAGSASTIASALEPKMASLTGMPYSVTREKSGEYGTMLAFAMRRVSQIHTKAKQAEAERQSFKPEQDRRWLVPLVARQWLDGYVKARTEASGAIDSYQLRKRALGGWSEVVSAWTGCETSEDRITAVRELQADLEKPGDTQLFEALAADDATCVWRSEGGKADPSILNDYVRAAVADQNAVRFKVPAYRHPDPLRSPSFIGFGKSQWSIAYSAQTEIRERKKHLERAAKSEKDAERARAALARDPVLQQVSLDLWGTGEMRTVEYRWQSTRLLNDLALASVQDLKGEKVSRATRFGTAGAAGGPFLLNGIDDDALWNGRLQAPRRELEDLARSLDSQDLPYDDETKWPAKLQARLQRVGWFLSHSAKLTPSGPWLDYVAKGLPDGCQWSESKKLPYELRLLHEENRTRKSRARLILSRLPGLRVLSVDLGLRTSAAAAVWQVVSRRELNAAKDAADSVAEGDLYCFARSGGRTQVFRRIGPSAWARLDRQFLIRLDGEQSAARPATSDEWNALQGLRAWLGCLREDKPEHLPPVDRLQQQAERLCRLGLRRLSDLARVAFLLSAKTRPIMGGRMAPLDDEGQIETAQEALVIWHALASSEEFQDPQVRQLWQTHVSDGPPLVGRLTKKQRQEVRDALRPPAERLHGNVAVSCELASLWQERSAEWAKRLRWLRDWVIPRFSKRTKGERVRLARKVGGLSLDRIATIRGVYQVMRAYASRPEPTNLGAGVERLEKAAAQKLRPEFGRRMLTKMERLRENRVKQIASRIVEAALGVGSEDPLHRKGRKRPAAAIADPRFAPCHAVVIENLENYRPDDKRTRRENRGLMTWSARAVYKYLAEGCELHGLYLRQVSPSYTSRQDSRTGSPGLRCNDVPVKELTNPEGWIGKLIARAEEAVKDGSASPRQKLLVTLAEAARNSGIASPAVRIIAPGGQLFVAADSSSPAAKGIHADMNAAANIGLVSLLDPDWSASWWRLPCKTATGEVDETKVGGSGAVPVDRAILDPNAEAGKGYVNAWSDPQDKAVSRREWLDTKAYWRGIEERVVEILRQWNRSGGRAQGGAVPF

SEQ ID NO: 3257 - protein, 1739 aa, unidentified
MNRIYQGRVTQVQQRQAKPAEEVGGLRNARSRAERDRQPQGCPEGEQQTKPAGPSMRSQRTETEWVNIENGEALLWRHHELFQDAVNYNTVALAALAYGMSDDKGEQLTPMGAFAAQVKERWEGFTHKGKKREGLRQSLSRTLRIKDEEATWETCMERILSASLKHFPNRKLSEKDSRDVFHGVIAEMFPAKSRGLNPQKMARSDWPWLCWKNASGETPAKAYYRKNNGINDFMSEFFATSESKLRELAKREVADTYLSSVVQAEDQEDQSTDAVDAADSLEDSSECEEAETVEQFTGLEAIAKWKLCVATAKKMLTDTTVNNDFLLLGGNQDSLVSEIESIEASITAKEAECQENPDVLHFQKWATGGKGKDNARVELFVLVHLSQALPQITKLLQARLKPVHLAHLIKTDPAAYIEFVDKYDLCGKEVEKGDPKNGKEPFEKVKKAREKAANAAKKQAKANTAEILPSTGASDASRRDCIQSIRDKCGVVFPGFTSIKEFVSSPPQSDKDLKWQPWAAGTTEWKEFEFAALEEALKSPNQIKQKTEERQKERSQLEATEKAYKGGGRAKSTDDDGGEDDHVPGFKGDERFARIEALHKTLAVADGVNEAEAHKYGFSQAALRGYEELRDEWNKLVKPGELFSEEKKSDLKEKVLKEHQREHRDDVGAVLLFEKLLERDNWCLWQAPTVEQEQERKEKNHSGNIVRDYMRYLEVKERIEELKKPVQYTPANAALSRRLYDLKGGAQGGFKHGVNKDGLWFETQIASEIKQDGKSYFERLEVRICYTSPRLLRDGARALSETENLKTANWMQPMTKALGIQSDLKHDFSKHAVSLMPDWTAGSDSSQPDRLLLNFVLRIKEDGLVAELRKLMQRKAWPWTMQFNWNGDGHDSTLRWPHENWSKVEGKKGFPGQWHASPDLTRFRFLSVDLGQKQAGAYAIMEVLSTLTEAEKAKCRFIGATGSGETKRCWYARVVKTGLLKLQGEDAKVYRPEYKNGKPVIGSESFREELSGSAGRGATSGESQQVLDLLGKMKQLELLNDLRDPPSGQEAGSKDVTIPVGLVQEAFTFPEQNSKLLVALRRAQSFAAKLHRWCWYLNPKEERKDQAERRRIAIKEIAEADAHDWLPPEAQAWAKTEHDRIKDKPEEKAAPDSRLAGKLQESLKALLPLLPHWLETIANRVYHARSGRFVWGEHPEKTDCHILSFKEWTDDERNKVSKDDRMIAGHRGLAIERIEQMEELRKRCQSLNQMLRRDIGDVPPRGRDDTIPDPCPAVLAKLDNIKEQRRNQTAHLIVAEALGLGLAEPRMQIRETEAKLLAARRENAALEKIEALKAKLAALRREVAFKDAHGEYTKVDAKGHPVLSEKEGDWRGIVDFVVIEDLSRYRTTQGRAPRENSRLMKWCHRAIRDKLKEMCEPFGIPLIETPAAYSSRFCSNTGAAGFRATELTAATIKQAKWRWRIRKREDGKEETKEQKARREQWEALYAEVKRINATRDGTEGNEFRTLLVPDAGGSIFIPIANLDASYVQPPKDPANKKNPRPIIQYLPVSLEEAQSPRPKLIHADINAAVNLALRAVGDPRLWSIHSRLRSEREIDEAKAKQKANKGGKAEGKKLDSVEHKQDKFFAREKRKHGILEGEKRVQIVTTVELKASDSRHPNFFEDVANLRGTNWGLAQLQGLGASERVPKHLVTGKALWGFVKDQSWDRCCVINAARLRSWAIKPPLAWEEAEERGKEILEA

SEQ ID NO: 3258 - protein, 1543 aa, unidentified
MNRIYQGRVSGVSTLNPDKEAALELRWLPQNGWENELWRHHALFQCATNYYTLCLAAMARGIDEPEFLAIALKVAEDSARRDPKHKTDAARQKAVEVAAETAKAMIVAVKGWRDEVAKTWVQGERRGKKMAGGYAEVAPILGVPVVDKADGASAFASCAAKALEGSKATRQEQAAALLQLLEEADGGDLSILVNDRLGWFCCPKGKSDKTPKSVASMQEIERQRIAREFRDLPDAEAIARASSLNLGVFLTTPPKSEVAGEEAEATLRKYWAKSAETHPGINAAADKLDAIAPDPKKAKAAVVASTQAVGEPLRIPALGRKPSGLYPVAAIFCFVPCVETLTAFRAATASLCEARDKQPSDDRIADSRVEDTPHFAYFTNHAFHRDVDAKEQAAWIQFDNAALVEAVKSPHRYYQDSQAREKAARALEEELQAMEGEGRAGSADEGAGAKAALDGFRDDVRVDRLLAVLFSDLGHLGEVDTPEDDKLSRPFITDAITRLQIELPENSREYTLRERTLRSWRAVRDGWRNLVEKKKEPTKDDLWAVVAKEQGEHRKDFGSARFYEALTEPENQCIWKPKGTHDFHAEDVVSAWAEYTELRRELRDKQRAIRFTPAHAKDSPRFFIFPKKASAGGKWGSAHERAATADARVAGDKPGTLAFTAGVAIRDGAKWRAVMTRITYYAPRLRRDGMRRDGEENLDAAPWLPPMIAAMGLAEPPAQDFGNCRITLQPHAFEDKDGVERYNIQLTFPVEIQAKKLIEQIKKQALWAKRFQSFGKGKDEQLFYWLHRHEQKVDPPKPLEEVISRFTFGSVDFGLHADSWAMHEARLDGNFGANKKGRPIVSRAITTGVEAPWRLATRDVRKLRLPGNDATVWRKREDNDAGRKRENERGEWDFREELYGDCGRSASEAETADCRELMCELLGKRWGWEFVSHTDKMPEDWETKMDGMLAGFSFPEQNDKLIVVARRAQSRLARIARWRAGIADDLRWESTLKELRQTCGFDDKDGKPPEPKPDGAPAGEQWISIAIRDAANANDRELLKTEARSEHARLIAALPPLLVRIANRVLPLRGRSWKWERVENREKEGRLHGLEQSGPKIPDVLLAGQRGLSIMRIEQIEELRRRFQSFNQAERRHHAAEQVEKGEWLADTAKTWVRRDFTDPCADLLDKLDEIKTQRVNQSAHMILAQMLGVRLAKPPPNKKELRNERDQHGVYEKFREPVDFVAIEDLSRYRASQGRAPQENGRLMKWCHRAVRDKLRQLCEPFGIPVLEVPAAYSSQFCSRSGVIGFRAEEVTEGFEKRAPWLFRLRVKDEEEKTAEQVEMEQLATDLTAAQKVMEREWRKKHGTGFAPKVTVVMPKQGGQIFVPIVAVEAQGNRLAAKVADADLNAAVNIGLRAVADPRMWEFFPRLRTTRISGAVSHKGRKPTKAKQAAAVASGANPTEEKIVLAAREKRKYGEKGPELSLGELPSGSAARETKQPNYFRDLGGIAIWDKAWVNDPLLPTEQIELVSSKALFAELKRRQWPRCCEINAARLEQWRATNSKQ

SEQ ID NO: 3259 - protein, 1091 aa, unidentified
TSPRVTQKLWDRLVLACEKDCGRQKSKLAFDGSASTIASALEPKMAALTGMPYSVTREKSGEYGTMLAFAMRRVSQIHTKAKQAEVERQSFAPEQARVDLVPPAARRWLDSYVEARTATTGAIDGYQLRRRALGGWSEVATAWAGCNTSADRIAAVRELQADMEKPGDIQLFEALAADDATCVWRSEGGKGDSSILTDYVRAAVADQNAVRFKVPAYRHPDPLRSPSFIGFGNSQWAIAYSAQAEVRERKKQLERAGKSEKDADRAREALAREPVLQQVSLDLWGLGEMRPVEYRWQSTRLLNDLALGSVRYLKGEKVSRATRFGAAGTAGGPFLLNGIDDDSPWNGRLQAPRRELEDLARSLDAQDLPYDDETKWPGKLQARLQRIGWFLSHSAKLTPSGPWLDYVAKGLSDGWEWASGRSGSYLFREDNKARKGRAKLILSRLPGLRVLSVDLGLRTSAAAAVWHVVSKRELNAARDAADSMTEGDLYCLVRRGNRTQVFRRIGPSAWARLDRQFLIRLDGEQSAARPATNDEWNALQNLHAWLGVSRENKPDRLPPVDRLQQQAERLCRLGLRRLSDLALVAFLLSAKTRPIIGGRTVPLDDEGRIEAAQDALTIWHALASSEEFQDSQLRQLWRARVSDGPPLVGRLTKKQRQEVREALRPVAERLSGNAAVSDELASLWQQRSAEWGKRLRWLRDWVIPRFSKRTKGERVRLARKVGGLSLDRIATIRGVYQVMRAYASRPEPTNLRAGVERLEKAAAQKLRPEFGRRMLAKMERLRENRVKQIASRIVEAALGVGSEDRLHWDKGRKRPSATIADPRFAPCHAVVIENLENYRPDDKRTRRENRGLMNWAARAVHKYLVEGCELHGLYLRQVSPSYTSRQDSRTGSPGLRCNDIPVKELTNPEGWIGKLVARAEEAAKEGAASPRQKLLVTLAEAARSGELTSSAVRILAPGGQLFVAADSSSSAAQGIHADMNAAANIGLVSLLDPDWPAAWWRLPCKAATGEVDETKVGGSGAVPIGRTILDPSAEAGKGYVNAWSDPQEKAVSRREWVDTKAYWRGIEERVVEILLAWNRSGGRDRQEKVPF

SEQ ID NO: 3260 - protein, 1039 aa, unidentified
MPYAATREKSGEYGTMLAFAMRRVSQIHTKAKQAEAERQSFGAEKRRMKLVPAAAKEWLEEYVEARSASSGAVDGYQLRTRAVSGWRDVVAAWGDCKTSDDRVAAVRELQADWDKAGDVQLFEALAAEAAVCVWRSADGEGVASILEDFVRAIEADHKALRFKVPSYRHPDPLRSPAFIGFGKSQWSISYSAQTEARERKKLLDRTAKPGPAAERAKEALAKQPVLQDVSMDLWVGERLQSCTYRWQSGRFLNDLALHSIQAMAGERVTRATRLGRSRLPNSPVLVDGISDDAPWNGRLQAPRRELEDLARALKAKGLPYDDESKWPRKLQRRLRHLGWFLTHSAKLTPSGPWLDYVANGLANDWQWANGRDGAYLFREDNKSRKGRAKLILSRLPGLRVLSIDLGLRTSAAAAVWHVVSKRELTAAKVSAQRVTETDLYCLVHANERTQVFRRIGPAAWARLDRQFLIRLDGEKASARSATPEEWKRLQDFRSWLGCGIEASPQTLPAVDCLHRAAERLCRLGLRRLSDLARVAFLLTAKDRPGMGGRMEPLDTEGRITAAQDALAIWHSLASSEEFVDERLRALWFANVGDSPALQGRLTKKQRQEVRESLRTAAEKLCGNVALGRELATVWQERSTKWAGWLRWLRDWVIPRFDKRINGERVRAARNVGGLSLDRIATIRGVYQVMRAYASRPEPTNLRAGVERLEKAAAQKLRPEFGRRMLAKMERLRENRAKQIASRIVEAALGVGSENRMHWARGRKRPAAVIADPRFAPCHAVVIENLDNYRPDDKRTRRENRGLMTWAAHAIGKYLAEGCELHGLYLRQVSPSYTSRQDSRTGCPGLRCNDVAVRDLENPEAWLSNAIARAEEAVRDGKATPRQELLAALADAARGKRLDSPAVRIVAPGGQLFVAADPESPAAAGIHADLNAAANIGLVALLDPDWPASWWRLPCKTSTGEVDETKVAGAEAVPNGRSILEAGLETGRGIVNAWSDPADGAVSRRTWSDSKQYWRDVERRVVEVLRWWNGGRIRRGAVPF

SEQ ID NO: 3261 - protein, 1389 aa, unidentified
MNRIYQGRVTRIEAKQDDGTFSQVVFGQDQSTCPLWQHHTIFQDAVNYYLMAMASLAKEQIKGADKLMTDLPKRMVEAWETFPRTDAARAGARSLRDSVAPWLGLDGSSTIAQAYDSILDGNTIDKKALSYALALVLEECSGDSGIQQGGREYLPKLCDAESKATFNYSSEALASGDGKERVAVVLHGDPSEQDLKALASEMDLSWMVKVSPGEFYEGTEAITRLNQAIDHLAKMIAEPSDRLALSLKDIPGAHAEIIRMREAVKSLPEGYRIARNRKAAPDLTFSSIVFMAFPSRLTAACLRLGVKAPAKSAATRKTKEKVDFAALGDDPVKLARGTRGYVFRAFTALPGWNPSNPGKPSWKEFDIAAFKEALKALNQFRLKTEERENKKKDLEGLIAYQIGSPIKGWKLTKDDSGEEAELPTPLDPGLLKLASDLEEEMTRGLSDIVVGEKKLLPFGEGHLPIREGGWTVTRASLRGLREIVGDWLKILAKNPEAPTAELEEAVKEHQRKEGKAGSIGSVGLFLTLCDPRYRPLWISAVSEDADNDGDSNRFLHRLADLHDDVGDYLRCQESVNLTPAEPRHSRRAIMFSDLNGRSAAKYLNEDTVEVSIARLSAGIVGEMRCRLRFSSPRLRRDGLLGEGWMQPMTRALGLKIDQSEPESFDSALSLMPDFDSSGSIRFLLNFAANIDAEPLRGALGKATRWDRQFNGTKEKNIHLHWPGTADPAKMKVTPWWDNPSIIDDGFTVLSTDLGQRTAGAWALLRITSSRPVTPRPVRSIGHDGTREWFAEVLKTGMHRLPGEDAVIRGKDGHMGQELSGKTGRMASEEEWNEAVELAKALLAEKPENWVGSYRVEKSHPEQNDSLLVLANRRLSRLGTFHRWSCFDPDKETDPARRDSLIAKLSAELDRWEDSDVLSWAAKLAAGDVTAFRAAAGEAFAKYRGDLLPLLVKLANRVAPLRDDLWGWKERGEGSPYGDLVRIPGREGEKPAIRGQRGLSMARIEQMENLRRLFLRYNRSLDRSPGAPAKFGPADAGRTSGEPCRELLAKIDRIKEQRVDQTAHLILAQALGVKLAPHSLDAATRRLGDHHGEYARISGRSPVDLVVIESLERYLTSQGRAPSENSRLMKWSHRAVRDKVKMLIEEPFGIPVLEVLAAYSSRFCAITSEPGSRCEERASLDDYLQELYGRRANTPPTAGHSDMRPWNRNLLGQFERLAGINATRLAAGKSPKTLLIPKTGGPLFLGAKESSVVQSDMNAAINLGFRAVAAPGALDLIHRIRSEKSSEQITTVAKSKREIAAYGGKGVPITIKGTSSTKLSKSANFFHDAKGIARFDNGEITLGGKTITVASGIGLWHAVNEAFLPRIVALNEERLMRILPVFDEKDEIPM

SEQ ID NO: 3262 - protein, 1484 aa, unidentified
MNRIYQGRVTKIDILSEDRKNPTVVDTFESYELNQSSPLWKHHETFQSAVNYYIVALASLARGISPNDNDPSPEQRLASDLLNRVHKSWENFPRSYYGAVPPKSLRTSLKDWLQLDDSSSANDAFNRILQGNDSPAATLHQALFLLLDKCGGESAIQQGGRGYLPRICDATYTGSWDLDTTAIDSSSGKDRLAATLHSEHSGHDITKLANEMSVSWAGIKCKPNEKISGDLLRKRLEEAISHQLKRIEAPETIALRQALDLFPDAQDELQRIKASLPTLPDSLELDLNKGGNISWDLVHSTYLFKAYPSPFTAKLLSLSIKKPTSSTKANNTKSYQSLEDDPIKLARSTRGYIFPAFTALPAWSPVSPGKPVWKEFDIAAFKEALKSLNQFNQKTSERAENRAYLKGRIAVLLGSKEESWKPRKTESGETEDLPKPLDPTLLNLADSLEERLTNELADTVVNREGAKILTFGQATRTLIPGKWQLSTASLRGFSEIAKEWNKLLDQKGASVSEDDLAAVVKEQQKSEKNKKSIGSISLFLALCDSEFHPLWREDGKTDADESDRLTSNRILHKVTELHQAIRDYERAQEPINLTPAEPRRSRRLYMFSDIGGKEKVIFKNSNVIETSLALFEGSGCAIRRVHLHYSAPRLKRDELIGGDTSQWLQPMTKALGIEPGETSPKFESAVSLMPDFTSNGETRFLLNFPKTLDSTRIHKALGKSPIWNGQFNGIQNKNIHLHWPATASTKPSKENPWWKNPAVLKSGFTLLSVDLGQRTAGAWALINVTPWKPESNKPVRSIGHDDSREWFAEIQQTGMHRLPGEDQQVLAKGGRFSREISGKAGRNSSDDEYQNAIKLCQDLGCSGSEEAKAWIGKTVTEKSLPEQNDSLLVLANRRLSRLATFHRWSCLHRALSEKSDDSKSQIRMTASTLAELSYWQDAEVKNQLKQLIEHYPYLEVLLPETEPTNGNPKKKRRSTSAKLWSAVELAAWQNEFHPDHFAGFSSAFGTIQTSFRDSLLKALVTLANRVTPVRGKTWNWKTRTTKDQDAAPYGELLLEEIRGEKTPLIRGQRGLSIARLEQLESLRTLFLRINRAMDKLPGKLSKAGYGFTNDAGEPCPELLEKIERMKEQRVNQTAHLILAQTLGVRLKAEKQDAKTRRESDIHGEYEPIPGRRPADFIVIENLDRYLTTQGRAPSENRRLMKWAHRAVRDKIKMLAEEPFGINVVEAPAAYSSRYCARTASPGSRCVEKAGLDPFTRDQLLKKSGAAPSPGHPDLRSLYQSLLGQFEQLDQANQERRSSDHSKPPHTLILPKPGGPLFLSVAASPLIQADANAAINIGLRGIAAPEAIDILHKIRTQTHQDKIHAAKYKHTEKNAREKACYTEGNVINTPSGISRSSKSKGSPNFFYLPDSALPQYNFDIASIQIGSKKHHLVSAVALHTLTDAAVLERIVTINSQRLSSWGIEQHSSPSPAPSADDDPDDQIPI

SEQ ID NO: 3263 - protein, 1316 aa, unidentified
MIKNGNGLEQFTGMYPISKTLRFELIPQRETSDHIQKKGILLKDEQLAENYRKVKRVIDEYHKVFISKVLEKADINWTELAQSLDQYREFQSEPNNKKNLQKFQELKRKEVSRLFTVHENYKDLFNKDLFLRILPQYLEEQSEKDEQLLMEVKSFNRFTTYFTGFSENRKNIYAEKEISSSIAYRIVHDNFPKFLSNLKTIEYIRKHAPDILVSFKSEFRSYAKNYTQNTSFDEWFDEIFSIQGFNKILTQAGIDQYNSILGGFASESGNVKVRGINEFCNLYRQQQQEISLNNPKIKLVPLYKQILSDRSSASFIPEAFATDAEVIDAISIFSSRIDEIGLYERIHLLMQDKGTHNLDKIYFANKEIGKVSIGLFQEWSRLTETLRNYKVDKEKLDLTKKNNGELLDKWLKSEDFSLSTVQKSLELANTLNEDHNHNGNEQIGIVNYYNHIETTLTWVQEKKEQFQDFIKNRSSDIALKDDLNGISSIKSYFDTMHDLLHVIKPFRVQAELDKDQTFYLEFDELYDELQLIVPLYNKVRNYITQKPYAESKYKLNFENPTLASGWDQNKEKDNTAILLMRNGEYFLGVMNANDKPKIKGTPTKVVENGYGKMVYKYFPDIAKMIPKCSTQLKEVNQHFKENNTDYYLKNQNFIDGLMISKTIYDLNNPIEGTAKKFTKEYLRNTGDDQGFNTATREWIHFCQQFLRSYSGTKEYNLEFMRRPETYQSYDEFLNDCDGEFYKITLEHLSVEEVHRWVSEGKLYLFQIYNKDFAVGSNGKPNLHTIYWKLLFDRENLKDVVMKLNGEAELFYRPASIKKPYKHKINEKMINRRTQDGAILPDRVYRELLQYVNTGDEGNLSDEAHALRNRIVIKEVKHEITKDKRFTQDKYLFHVPITINFKASGQSRDINDKVISYLVNNKQVNIIGIDRGERNLLYVSVIDQQGNLLHQQSYNTAGGTNYSEKLTQREQERDQARKSWTSIEAIKDLKEGYLSIVVHELAKLMVQYNAVIILEDLNFGFKRGRFKFERQVYQKFEKMLIEKLNYLVFKDVKNDVPGGALRGFQFTNKFESFKSLGKQSGFLFYVPASFTSKVDPTTGFINAFNLKELTNMEKKRDFFGKFDSIIYDGIEDSFVFQFNYNRFKTFQNCAIKEWAVFTNDKRIVYNTKKKMYEEVNPTELLKDALQKAGITYLPGKNLIHDIMGIEVTKDKSWFFDGLYNAFSKTLQLRNSNPNTGEDYIRSPVKNMNDTFFDSRVLNGHMLPVDADANGAYHIALKGLYILNKISAKLESDQDKLKIPVISNVDWLRFIQNKEFNN

SEQ ID NO: 3264 - protein, 1203 aa, unidentified
LFGSTSDYFATPSANSGPAEPKDFANTCRDWVSSFWGGGEKANKAKILTALSAIGQIKPARVVGKRGPAALAVIASALKQKPADDSVEALARAIGWLTGRPSAARLAIDAIATSPRVTQKLWDRLVLACEKDCGRQKSKLAFDGSASTIASALEPKMAALTGMPYSVTREKSGEYGTMLAFAMRRVSQIHTKAKQAEVERQSFAPEQARVDLVPPAARRWLDSYVEARTATTGAIDGYQLRRRALGGWSEVATAWAGCNTSADRIAAVRELQADMEKPGDIQLFEALAADDATCVWRSEGGKGDSSILTDYVRAAVADQNAVRFKVPAYRHPDPLRSPSFIGFGNSQWAIAYSAQAEVRERKKQLERAGKSEKDADRAREALAREPVLQQVSLDLWGLGEMRPVEYRWQSTRLLNDLALGSVRYLKGEKVSRATRFGAAGTAGGPFLLNGIDDDSPWNGRLQAPRRELEDLARSLDAQDLPYDDETKWPGKLQARLQRIGWFLSHSAKLTPSGPWLDYVAKGLSDGWEWASGRSGSYLFREDNKARKGRAKLILSRLPGLRVLSVDLGLRTSAAAAVWHVVSKRELNAARDAADSMTEGDLYCLVRRGNRTQVFRRIGPSAWARLDRQFLIRLDGEQSAARPATNDEWNALQNLHAWLGVSRENKPDRLPPVDRLQQQAERLCRLGLRRLSDLALVAFLLSAKTRPIIGGRTVPLDDEGRIEAAQDALTIWHALASSEEFQDSQLRQLWRARVSDGPPLVGRLTKKQRQEVREALRPVAERLSGNAAVSDELASLWQQRSAEWGKRLRWLRDWVIPRFSKRTKGERVRLARKVGGLSLDRIATIRGVYQVMRAYASRPEPTNLRAGVERLEKAAAQKLRPEFGRRMLAKMERLRENRVKQIASRIVEAALGVGSEDRLHWDKGRKRPSATIADPRFAPCHAVVIENLENYRPDDKRTRRENRGLMNWAARAVHKYLVEGCELHGLYLRQVSPSYTSRQDSRTGSPGLRCNDIPVKELTNPEGWIGKLVARAEEAAKEGAASPRQKLLVTLAEAARSGELTSSAVRILAPGGQLFVAADSSSSAAQGIHADMNAAANIGLVSLLDPDWPAAWWRLPCKAATGEVDETKVGGSGAVPIGRTILDPSAEAGKGYVNAWSDPQEKAVSRREWVDTKAYWRGIEERVVEILLAWNRSGGRDRQEKVPF

SEQ ID NO: 3265 - protein, 1410 aa, unidentified
MNRIYQGRVTRIEAKKEDGTFEQVAFGQDQSTCPLWQHHTIFQDAVNYYLLAMASLAKEQIKGADKLMSDLPKRMVEAWETFPRTDAARAGARSLRDSVAPWIGLDGSSTIDQAYDSILNGNKVDKKALSYALALVLEECSGDSGIQQGGREYLPKLCVSDFDGTFDYSVSALASDNGKHRLGKVLHGNPSEGDLRKIASEMDLSWMVKISPEKFYEGEEAIKRLNQAIDHLELMIVSPSERLRAYLVAVPDAVERINSMRDAVKTMPEGFRVVRNKKPPSLDVLFSAIAFMAFPSFLTAACLKLGISETPASAESTKSKEGIEFASLGDDPVKLARGARGYVFPAFTALPRWKPANPGKPAWKEFDIAAFKEALKALNQFRLKTEEREEKKANLEGLIAHLIGSPIKGWKPSREDGEEGEIPDPIDPILLKLGWALEEEMTRGLSESVVGEKRNLSFGAGCIPHRDGGWTVTRASLRGLRDIVQEWRKKTAKNGPEVSTETLAKVVKNYQGREEKAASIGSVGLFLTLCEPRFRPLWMTVDEDEGDEAEENRFLRSLADLHDSVEEYERCKEAINLTPAEPRHSSRHYPFDDLAYANRKKGPTKKELQQNKQFLDEGCFDLEMIREERNGHLGKQSIRIHYSAPRFRRDGLSGSDREGWLQPMMKALDLKKIKTIERFDPSFTLMPEFGELCSLRFLLNFVAVIDPEPMQVALGKALLWNKQFHGFKEKKKTKHIYLHWPGTADPSKMKVTPWWENPSVVEQGFTVLATDLGQRTAGAWALLRVTASKNDSPRPIRSIGHDGKREWFAEILKTGMHRLPGEDAYMRNKGGLMEQEKSGKTGRIASEAEWRESLELAKALLADCPENWVGERPDEKSYSEQNDSLIVLANRRLSRLGIFHRWSCFDPEKESDPARRKSLVWKLVAELEQWEDEEVRGWASALASGDVAAFKESAGRAFAAYRYSLLPLLVRLAERVAPLREDRWEWIAREDGTPYGNLIRKPRDPGAVKPLVRGQRGLSLARIEQMENLRRLFLRYNRSLDREAGQPAAFGRADAGRSSGEPCRDLLEKIDRIKEQRVDQTAHLILAQALGVKLAPHSLDGKARLAGDHHGEYEKISGREPVDLVVIEDLSRYLSSQGRAPSENSRLMKWAHRAIRDKVKMLVEEPFGIPVLEVPAAYSSRFSAVTGEPGSRCEERATLDEYLKGILTRRSLTPPSQGQSDLRPAYQRLLAQFAELDRLNTPRLASGKSPFTLLLPKPGGPLFLGAASGGPAVQSDMNAAINLGFRAVASPGALHLLHRVRSQSDGQEITTLVKNAREKAAYGGKGVPITMKGAASPKLSKSANFFHDAKGISRFDSGEITLGGKTIPVASGIGLWHAVNEAFLPRIVALNEERLMRMLPVFDEKDQIPM

SEQ ID NO: 3266 - protein, 1402 aa, unidentified
MNRIYQGRVSSVEIQQPDGRFKQISFAGTRDSQDQSTCPLTHHHGVFQDAVNYYLVALASLSNSDQAIDGDLRVMQDLRKQLTAAWERFPREDAARKHARSLRDSVSPWLMLSSAASLTDAFEAILMGNKAEKECRALALALVLSKCAGDSGVQQGGREYFPRLCIANYKGKWDFSNEARSAGVGKQRLAAILHGTPSQRELEDIAAEMDLAWTVAVDPETTYEGDDAKNRIKEALTHLSTKMLANPSDRLREWLQEIPDSDAQIAELFQAISSLPETLKLRGNRKAAPDLKFASIAFMAFPCQLTRMCLRLGVKEPGKAPKKPSGDANPFAMLGDDPIRMARDQVGYVFPAFTTLTAWSGSKPGAPAWKEFDIAAFKEALKALNQFSQKTKERDDTQADLRGTIAHLLGGATEGWKPKKAESEEDVELPAQLDPALLTLALQLESQLSLALSESVLGEAQALSFGGKNYAYRDGGWTVTGASLRGFCDIAEDWNKLFRKHGKELTSEPLVEVVKSYQQQENNKRSIGSVQLFLTLCEREFWPLWQVDRDTGGEEEGQTFVNRFLYRLADFHDLVRDYLRSQEPIKLTTAEPRYSRRLYMFSDLSGRSAPKFGKGEANSTVEVSLAARDENGQEKEVRAKLHFSAPRLVRDQLLGVADSRWLQPMTAALGLEQPAPSVSFESAVSLMPDFDQAGNLRFLLNFPKTLETDWIHQGLGRAHFWKGQFNGIKGKNLHLHWPGTAKTDSAKRSPWWENPIIQKSGFTVLSTDLGQRSAGAWALLRVTAGKPVSNKPVRIVGSDGTRTWFAEVLASGMHRLPGEDVQVRSKTGTMERELSGKAGRNALPHEWEQAKQLAIRLRAADPENWVGASVNEKSFPEQNDALLALANRRLSRLSTFHRWSCFDPNKADPAKRVGMIHKLGAELAEWSDPQVLSWKALLDAGDFAAFQAQAGAAFARYRLELNELLVSLANRVCPVRGKTWEWQLRDDKTPYGDLVWAACDNAPWVRGQRGLSMARLEQLESLRRIFLRYNRALDRESGQLARFGRLDEGRASGEPCQLLLEKIDQIKEQRVNQTAHLILAQALGVRLREHTASPKDRVKHDIHGEYEQIPGRTPVDFIVIENLERYLTSQGRAPSENSRLMKWSHRAIRDKIKMLAEDPFGIPVVETAAAYSSRFCAVTGEAGSRCEERPELDAFLSKQYEKRADTPPAKGQQDQRAFYKTLLEQFEKCAALNKTKCTQTGTQRAPRTLLIPKTGGPLFLGAREAKLTQADMNAAINLGLRAVAAPGTIALLHKIRVRREAGLLKPVSKTARETVAFGSAASIEITGASSGKLDAAKAPNFFYDAGEVALFDRGYVATGKDRVPVASGIGLWGSVNTRFLARIVSLNAARLKKWVPNDEIPM

SEQ ID NO: 3267 - protein, 979 aa, unidentified
VEARTATTGAIDGYQLRRRALGGWSEVATAWAGCNTSADRIAAVRELQADMEKPGDIQLFEALAADDATCVWRSEGGKGDSSILTDYVRAAVADQNAVRFKVPAYRHPDPLRSPSFIGFGNSQWAIAYSAQAEVRERKKQLERAGKSEKDADRAREALAREPVLQQVSLDLWGLGEMRPVEYRWQSTRLLNDLALGSVRYLKGEKVSRATRFGAAGTAGGPFLLNGIDDDSPWNGRLQAPRRELEDLARSLDAQDLPYDDETKWPGKLQARLQRIGWFLSHSAKLTPSGPWLDYVAKGLSDGWEWASGRSGSYLFREDNKARKGRAKLILSRLPGLRVLSVDLGLRTSAAAAVWHVVSKRELNAARDAADSMTEGDLYCLVRRGNRTQVFRRIGPSAWARLDRQFLIRLDGEQSAARPATNDEWNALQNLHAWLGVSRENKPDRLPPVDRLQQQAERLCRLGLRRLSDLALVAFLLSAKTRPIIGGRTVPLDDEGRIEAAQDALTIWHALASSEEFQDSQLRQLWRARVSDGPPLVGRLTKKQRQEVREALRPVAERLSGNAAVSDELASLWQQRSAEWGKRLRWLRDWVIPRFSKRTKGERVRLARKVGGLSLDRIATIRGVYQVMRAYASRPEPTNLRAGVERLEKAAAQKLRPEFGRRMLAKMERLRENRVKQIASRIVEAALGVGSEDRLHWDKGRKRPSATIADPRFAPCHAVVIENLENYRPDDKRTRRENRGLMNWAARAVHKYLVEGCELHGLYLRQVSPSYTSRQDSRTGSPGLRCNDIPVKELTNPEGWIGKLVARAEEAAKEGAASPRQKLLVTLAEAARSGELTSSAVRILAPGGQLFVAADSSSSAAQGIHADMNAAANIGLVSLLDPDWPAAWWRLPCKAATGEVDETKVGGSGAVPIGRTILDPSAEAGKGYVNAWSDPQEKAVSRREWVDTKAYWRGIEERVVEILLAWNRSGGRDRQEKVPF

SEQ ID NO: 3268 - protein, 1341 aa, unidentified
KYEAATEKKVREEVAARKKKITEAAVARDLLAARRSELRRILALSWICPETPVQLVPQAAVVAAADDIDRERKVLDRFRQILKQKGVADVAGWLQDCDATLRAAIRPDAVWVDRTACFRAMPAAVRPSEIDAAKHLFRLFGSTSDYFATPSANSGPAEPKDFANTCRDWVSSFWGGGEKANKAKILTALSAIGQIKPARVVGKRGPAALAVIASALKQKPADDSVEALARAIGWLTGRPSAARLAIDAIAISPRVTQKLWDRLVLACEKDCGRQKSKLAFEGSASTIASALEPKMAALTGMPYSVTREKSGEYGTMLAFAMRRVSQIHTKAKQAEVERQSFAPEQARVDLVPPAARRWLDSYVEARTATTGAIDGYQLRRRALGGWSEVATAWAGCNTSADRIAAVRELQADMEKPGDIQLFEALAADDATCVWRSEGGKGDSSILTDYVRAAVADQNAVRFKVPAYRHPDPLRSPSFIGFGNSQWAIAYSAQAEVRERKKQLERAGKSEKDADRAREALAREPVLQQVSLDLWGLGEMRPVEYRWQSTRLLNDLALGSVRYLKGEKVSRATRFGAAGTAGGPFLLNGIDDDSPWNGRLQAPRRELEDLARSLDAQDLPYDDETKWPGKLQARLQRIGWFLSHSAKLTPSGPWLDYVAKGLSDGWEWASGRSGSYLFREDNKARKGRAKLILSRLPGLRVLSVDLGLRTSAAAAVWHVVSKRELNAARDAADSMTEGDLYCLVRRGNRTQVFRRIGPSAWARLDRQFLIRLDGEQSAARPATNDEWNALQNLHAWLGVSRENKPDRLPPVDRLQQQAERLCRLGLRRLSDLALVAFLLSAKTRPIIGGRTVPLDDEGRIEAAQDALTIWHALASSEEFQDSQLRQLWRARVSDGPPLVGRLTKKQRQEVREALRPVAERLSGNAAVSDELASLWQQRSAEWGKRLRWLRDWVIPRFSKRTKGERVRLARKVGGLSLDRIATIRGVYQVMRAYASRPEPTNLRAGVERLEKAAAQKLRPEFGRRMLAKMERLRENRVKQIASRIVEAALGVGSEDRLHWDKGRKRPSATIADPRFAPCHAVVIENLENYRPDDKRTRRENRGLMNWAARAVHKYLVEGCELHGLYLRQVSPSYTSRQDSRTGSPGLRCNDIPVKELTNPEGWIGKLVARAEEAAKEGAASPRQKLLVTLAEAARSGELTSSAVRILAPGGQLFVAADSSSSAAQGIHADMNAAANIGLVSLLDPDWPAAWWRLPCKAATGEVDETKVGGSGAVPIGRTILDPSAEAGKGYVNAWSDPQEKAVSRREWVDTKAYWRGIEERVVEILLAWNRSGGRDRQEKVPF

SEQ ID NO: 3269 - protein, 1254 aa, unidentified
LLRKRLEEAISHQLKRIEAPETIALRQALDLFPDAQDELQRIKASLPTLPDSLELDLNKGGNISWDLVHSTYLFKAYPSPFTAKLLSLSIKKPTSSTKANNTKSYQSLEDDPIKLARSTRGYIFPAFTALPAWSPVSPGKPVWKEFDIAAFKEALKSLNQFNQKTSERAENRAYLKGRIAVLLGSKEESWKPRKTESGETEDLPKPLDPTLLNLADSLEERLTNELADTVVNREGAKILTFGQATRTLIPGKWQLSTASLRGFSEIAKEWNKLLDQKGASVSEDDLAAVVKEQQKSEKNKKSIGSISLFLALCDSEFHPLWREDGKTDADESDRLTSNRILHKVTELHQAIRDYERAQEPINLTPAEPRRSRRLYMFSDIGGKEKVIFKNSNVIETSLALFEGSGCAIRRVHLHYSAPRLKRDELIGGDTSQWLQPMTKALGIEPGETSPKFESAVSLMPDFTSNGETRFLLNFPKTLDSTRIHKALGKSPIWNGQFNGIQNKNIHLHWPATASTKPSKENPWWKNPAVLKSGFTLLSVDLGQRTAGAWALINVTPWKPESNKPVRSIGHDGSREWFAEIQQTGMHRLPGEDQQVLAKGGRFSREISGKAGRNSSDDEYQNAIKLCQDLGCSGSEEAKAWIGKTVTEKSLPEQNDSLLVLANRRLSRLATFHRWSCLHRALSEKSDDSKSQIRMTASTLAELSYWQDAEVKNQLKQLIEHYPYLEVLLPETEPTNGNPKKKRRSTSAKLWSAVELAAWQNEFHPDHFAGFSSAFGTIQTSFRDSLLKALVTLANRVTPVRGKTWNWKTRTTKDQDAAPYGEMLLEEIRGEKTPLIRGQRGLSIARLEQLESLRTLFLRINRAMDKLPGKLSKAGYGFTNDAGEPCPELLEKIERMKEQRVNQTAHLILAQTLGVRLKAEKQDAKTRRESDIHGEYEPIPGRRPADFIVIENLDRYLTTQGRAPSENRRLMKWAHRAVRDKIKMLAEEPFGINVVEAPAAYSSRYCARTASPGSRCVEKAGLDPFTRDQLLKKSGAAPSPGHPDLRSLYQSLLGQFEQLDQANQERRSSDHSKPPHTLILPKPGGPLFLSVAASPLIQADANAAINIGLRGIAAPEAIDILHKIRTQTHQDKIHAAKYKHTEKNAREKACYTEGNVINTPSGISRSSKSKGSPNFFYLPDSALPQYNFDIASIQIGSKKHHLVSGVALHTLTDAAVLERIVTINSQRLSSWGIEQHSSPSPAPSADDDPDDQIPI

SEQ ID NO: 3270 - protein, 1026 aa, unidentified
MLAFAMRRVSQIHTKAKQAEVERQSFAPEQARVDLVPPAARRWLDSYVEARTATTGAIDGYQLRRRALGGWSEVATAWAGCNTSADRIAAVRELQADMEKPGDIQLFEALAADDATCVWRSEGGKGDSSILTDYVRAAVADQNAVRFKVPAYRHPDPLRSPSFIGFGNSQWAIAYSAQAEVRERKKQLERAGKSEKDADRAREALAREPVLQQVSLDLWGLGEMRPVEYRWQSTRLLNDLALGSVRYLKGEKVSRATRFGAAGTAGGPFLLNGIDDDSPWNGRLQAPRRELEDLARSLDAQDLPYDDETKWPGKLQARLQRIGWFLSHSAKLTPSGPWLDYVAKGLSDGWEWASGRSGSYLFREDNKARKGRAKLILSRLPGLRVLSVDLGLRTSAAAAVWHVVSKRELNAARDAADSMTEGDLYCLVRRGNRTQVFRRIGPSAWARLDRQFLIRLDGEQSAARPATNDEWNALQNLHAWLGVSRENKPDRLPPVDRLQQQAERLCRLGLRRLSDLALVAFLLSAKTRPIIGGRTVPLDDEGRIEAAQDALTIWHALASSEEFQDSQLRQLWRARVSDGPPLVGRLTKKQRQEVREALRPVAERLSGNAAVSDELASLWQQRSAEWGKRLRWLRDWVIPRFSKRTKGERVRLARKVGGLSLDRIATIRGVYQVMRAYASRPEPTNLRAGVERLEKAAAQKLRPEFGRRMLAKMERLRENRVKQIASRIVEAALGVGSEDRLHWDKGRKRPSATIADPRFAPCHAVVIENLENYRPDDKRTRRENRGLMNWAARAVHKYLVEGCELHGLYLRQVSPSYTSRQDSRTGSPGLRCNDIPVKELTNPEGWIGKLVARAEEAAKEGAASPRQKLLVTLAEAARSGELTSSAVRILAPGGQLFVAADSSSSAAQGIHADMNAAANIGLVSLLDPDWPAAWWRLPCKAATGEVDETKVGGSGAVPIGRTILDPSAEAGKGYVNAWSDPQEKAVSRREWVDTKAYWRGIEERVVEILLAWNRSGGRDRQEKVPF

SEQ ID NO: 3271 - protein, 1349 aa, unidentified
MNRIYQGKITALEIARSKSEFEALLFGQQHSCPIYGHHRIFQDAINYYLVHLAALAVPEYSENNRVMRDMRTRIGEFWSSFRTATDGLSLRDSLRPWLSFIDDETTLDQLYAHILDGNENLQACSLALGLLLSKCSGDSGIQQNGRGYFPRFCDAKTNPSWDFSASSVASASGKEELAAVLHGESSQEDLETTARNMSLTWLVKCDPSKEFVGDEAKARLKEALTHLIDSFQSPSVRLEEMTKSLTEDPLEFLKSCLSEIDSLDDSITIPRNRKAAKDVTFGALAFMFFPHAVTQGFLKLCVKAPSKTALKKSSSDQQIDFGCLGNDPILLARGKRGYVFPAFTALPSWNPVSPGEPVWKEFDIAAFKEALKALNQFNQKTDERYAAYMKLLKQKDFILNVPGVKWEDARDNDEHREPLQLGADPRYPLAKTLEYELTETLNEGDWKITRSAIRGLSDIIEKWQKIKNPTATVLENVVKDYQRDEKNKRDIGSVPLFLALCQEMYWPLWQHEVEEDEEHDDKPIGLFRALAAFHELEFDIERKSQPIKLTPAEPKLSRRLYMFSDLMGRSAVKFHSNTVEVSLAYRDEKGIAEKRVKLTFSAPRLGRDSLLGGDHANWLQPMVKALGFSDPSATKAFASAVSLMPDFNREGELRLLLNFPVKLEPAWIHQAIGRSHFWSNQFNGTREENLHLHWPDTASDATMRNPWWTQPAIVKNGFTVLSNDLGQRTAGAWSLITVTAQQPVTTKPWHFIGEAGGHSWYATLSAQGMHRLPGEDVKVLQDGKWVTEKSGAKGRLASPEEYQEALGLAELLGALEPKSWLGENDGEKSYSEQNDSLIRIANRRLTRLATYHRWTCFAPEKSDDPARQTKQTDAIKIELDGYTDPDVLALKICVEQNDWMAFRLAASNLLNDLKVRLQNLMVQIANRTVPLRKKKMWQWQMNGGTSPYGRLMMVDTEHDYSPKTRGQRGISMSRIEQLDSLRTLFLRFNRALDKVPGTPATFGFSDRGRESGEPCPQLLEKIDAMKEQRVNQTAHLILAQALGLRLKQTSLTPQEREKNDIHGEYEKIPNRHPVDFIVIEDLSRYTSSQGRAPSENSRLMKWAHRAVRDKIKMLAEEPFGIPIVEVQPAYSSRFHAATGVAGARGFELTGLEEYQRLSLEKMAARSYADSQKSIASNAQTLLAQFDELAKINANLPAHKKHTLFYPKAGGPMFLAADGQKPTQADLNAASNLGLRAIASPHALHIHQKIRTEKKNASLLAVKNNKREKAAFKQDEKIVLAKEMSKELTKSTRPNFFYDKALIGIFDRATLQNHSVTSGVSLWSSVTVKVLDAAVRLNRKRLDAEDKIPM

SEQ ID NO: 3272 - protein, 1373 aa, unidentified
MNRIYQGRVSSVQIPNHQGVIKNFPLGNSESCVLWQHHKIFQDAVNYYLVALGSLADSSSDNRVIQDLRARLSESWEKFPRDLYGASSLRDSLRRSLPGLKQSATLQEAFDFILAGNDTTPRAKELSLVSLLHDLGGDIQKGSKRFFPFFCDPSTKATFPRARVGLLKAEGKDLVPDLLWNLAPEFDAKEVVSRLKFEYFANPNESALPMKGDEAKSRLIDALANPPLAAAISEQVYAEIKDAIDSEGGDYEIPRYFFGGAGAEIRQLRLDVFLLAKHALPHTKLISVLRNSFKRPVAKKSKAEDETEAALRSLGDDPLIIARGPRGYIFPSFTSLALWFGASNHEPTWRDFDIAAFAEALKSLNQFTQKTIERDANLQLAKQTLDYMMGRSDVPPKSSDVDGETKTLSRPGKDARWPKVIELERELSENLNEGSWQLSRGSLRGLRDIVELWEKQPNASPAELQAEVKRYQANDKHKREIGSVQLFLLLCEERYQDLWRSDSQHHDDEEPDHAGGILSDAIEVHQLEREVTRFAEPIRLTPAEAAFSRRLFMFSDLTDKLAKVKFGESVANDGGRKTHYVETAIALADDTGLRETRVRINFTAPRLSRDELLGGAESRWLQPMTAALGLSQPKPDEKFDSAVALMPDRLDDGSIRHLLNFPVSLDSSWLHEALGKSANWKGQFNGIKDKNLHLHWPGTAKDATKKNPWWECKAIITEGFTVLSNDLGQRSAGAWALLKVTCWKPETKRPFRSIGHDGKREWFAEVLKSGMYRLPGEDQQVQKNGAWVPEKSGKTGRMAGDDEYTAAFSLAKKLLGAETDEAVGSWLGPKGERSFPELNDQLIKIANRRFTRLSTYHRWSCFRPENLDEPIRKAKVIDGQIVELEAYQDKEVVAWKELLKAGDITGFRDQAGMAFENLRSDLEGHLINLANLTVPLRQKLWTWQQRPGDSKYGDLLMVDFEDSHPKVRGQRGLSMPRLEQLDGLRRLFLRFNRSLDREKYTPAKFGRADEGRTSGEPCQALLDKIDRMKEQRVNQTAHLILAQALGVRLRPHQFSDADRRTRDIHGEYEKINGREPVDFIVIEDLSRYLSSQGRSPSENSRLMKWAHRAVRDKLKMLAEEPFGIPVVETVPAYSSRFHAHPENGQPGSRLHELHELATYQIQSLENLATKSDFKDRHRASAAAELLEQFKAIHPENERRKDFNRNRAKGVPALPLFTLYYPQAGGPLFLAVRDGNPVQADLNAAINLGFRAIAAPECIQVHRRVRAAKEKDIYRPKLGNAREKAAYTKDDSILLDGPLSKKFGASSSPNFFLEPDGLTQVEGDPLFDRATLKGQSLVSGVALWSTVNAAIYLRCAELNRYRLKIWKLEDDIPM

SEQ ID NO: 3273 - protein, 1389 aa, unidentified
MNRIYQGRVTRIEAKKEDGTFSQVVFGQDQSTCPLWQHHTIFQDAVNYYLLAMASLAKEQITGADKLMTDLPKRMVEAWETFPRTDAARAGARSLRDSVAPWIGLDGSSTIAQAYESILDGNEVDKKALSYALALVLEECSGDSGIQQGGREYLPKLCDSESKATFNYSSEALASGDGKDRVALVLHGDPSEQDLKALASEMDLSWMVKVSPGEFYEGTEAVTRLNQAIDHLAQMIAEPTARLAVSLKDIPRADAEITRMRDSVKSLPEGYRVARNRKAAPDLTFSSIAFMAFPSRLTAACLKLGVKAPAKSAAPRKKKEKIDFAALGDDPVKLARGTRGYVFRAFTALPSWNPSNPGKPSWKEFDIAAFKEALKALNQFRLKTEERENKKKDLEGLIAYQIGSPIKGWKLTKDDSGEEAELPTPLDPDLLKLAWDLEEEMTRGLSDIVVGEKKLLPFGEGHLPIREGGWTVTRASLRGLREIVGDWLKILAKNPEAPTSELEEAVKEHQQKEGKAGSIGSVGLFLTLCHPRYRPLWISTTLEDADNDGDSNRFLHRLADLHDDVGDYLRCQESVNLTPAEPRHSRRAIMFSDLNGRSASKYINADTVEVSIARLSAGNVGELRCRLRFTSPRLRRDGLLDEGWMQPMTRALGLKIDQSEPEPFDSALSLMPDFDSSGSIRFLLNFAANIDAEPLRGALGKASRWDRQFNGTKDKNIHIHWPGTADPAKMKVTPWWADPAVIAGGFTVLSTDLGQRTAGAWALLRITSSRPETTRPVRLVGHDGTREWFAEVLKTGMHRLPGEDAEVRGKDGRMGQELSGKTGRMASEEEWNEAIELAKALLAEEPENWVGSNRVEKSHPEQNDSLLVLANRRLSRLGTFHRWSCFDPDKETDSARRDSLIAKLTAELDHWEDSDVLSWAAKLAAGDVTAFKAAAGEAFAKYRRDLLPLLVKLANRVAPLRDDLWEWKERGAGSPYGDLVRTPAGEKAKATIRGQRGLSMARIEQMENLRRLFLRYNRSLDRSPGTPAKFGRADAGRTSGEPCRELLGKIDRIKEQRVDQTAHLILAQALGVKLAPHSLDAATRRSGDHHGEYARISGRSPVDLVVIESLERYLTSQGRAPSENSRLMKWSHRAVRDKVKMLIEEPFGIPVLEVPAAYSSRFCAVTGEPGSRCEERASLDDYLEEMYGRRANTPPTAGHSDMRPWNQKLLGQFDRLAGINAKRIAEGKAPKTLLLPKTGGPLFLGAKESSVVQSDMNAAINLGFRAVASPGALHLLHRVRSQSDGQEITTLVKNAREKAAYGGKGVPITMKGAASPKLSKSANFFHDAKGISRFDSGEITLGGKTIPVASGIGLWHAVNEAFLPRIVALNEERLMRMLPVFDEKDQIPM

SEQ ID NO: 3274 - protein, 1344 aa, unidentified
VNYYLLAMASLAKEQITGADKLMTDLPKRMVEAWETFPRTDAARAGARSLRDSVAPWIGLDGSSTIAQAYESILDGNEVDKKALSYALALVLEECSGDSGIQQGGREYLPKLCDSESKATFNYSSEALASGDGKDRVALVLHGDPSEQDLKALASEMDLSWMVKVSPGEFYEGTEAVTRLNQAIDHLAQMIAEPTARLAVSLKDIPGADAEITRMRDSVKSLPEGYRVARNRKAAPDLTFSSIAFMAFPSRLTAACLKLGVKAPAKSAAPRKKKEKIDFAALGDDPVKLARGTRGYVFRAFTALPSWNPSNPGKPSWKEFDIAAFKEALKALNQFRLKTEERENKKKDLEGLIAYQIGSPIKGWKLTKDDSGEEAELPTPLDPDLLKLAWDLEEEMTRGLSDIVVGEKKLLPFGEGHLPIREGGWTVTRASLRGLREIVGDWLKILAKNPEAPTSELEEAVKEHQQKEGKAGSIGSVGLFLTLCHPRYRPLWISTTLEDADNDGDSNRFLHRLADLHDDVGDYLRCQESVNLTPAEPRHSRRAIMFSDLNGRSASKYINADTVEVSIARLSAGNVGELRCRLRFTSPRLRRDGLLDEGWMQPMTRALGLKIDQSEPEPFDSALSLMPDFDSSGSIRFLLNFAANIDAEPLRGALGKASRWDRQFNGTKDKNIHIHWPGTADPAKMKVTPWWAGPAVIAGGFTVLSTDLGQRTAGAWALLRITSSRPETTRPVRLVGHDGTREWFAEVLKTGMHRLPGEDAEVRGKDGRMGQELSGKTGRMASEEEWNEAIELAKALLAEEPENWVGSNRVEKSHPEQNDSLLVLANRRLSRLGTFHRWSCFDPDKETDSARRDSLIAKLTAELDHWEDSDVLSWAAKLAAGDVTAFKAAAGEAFAKYRRDLLPLLVKLANRVAPLRDDLWEWKERGAGSPYGDLVRTPAGEKAKATIRGQRGLSMARIEQMENLRRLFLRYNRSLDRSPGTPAKFGRADAGRTSGEPCRELLGKIDRIKEQRVDQTAHLILAQALGVKLAPHSLDAATRRSGDHHGEYARISGRSPVDLVVIESLERYLTSQGRAPSENSRLMKWSHRAVRDKVKMLIEEPFGIPVLEVPAAYSSRFCAVTGEPGSRCEERASLDDYLEEMYGRRANTPPTAGHSDMRPWNQKLLGQFDRLAGINAKRIAEGKAPKTLLLPKTGGPLFLGAKESSVVQSDMNAAINLGFRAVASPGALHLLHRVRSQSDGQEITTLVKNAREKAAYGGKGVPITMKGAASPKLSKSANFFHDAKGISRFDSGEITLGGKTIPVASGIGLWHAVNEAFLPRIVALNEERLMRMLPVFDEKDQIPM

SEQ ID NO: 3275 - protein, 1382 aa, unidentified
MNRIYQGRVSNIQIPDAAGILKNAPLGNSESCVLWQHHRIFQDAVNYYLAALGSLADSDSDNRVIQDLRARLSESWEKFPRDLHGASSLRDSLRRSLPGLKQSATLQDAFDLILAGNEASPHVRTLSLSLILAKCGGDAAIQQGGRAYLPRLCDAKSNPTWDYSAAALESGAGAARLAPVLHGESSQQQLEAIARDMDLSWVVKVQPGKIYQGDDAKDRLKEAVSHLIKMLGYPSTRLAEALSPLSEDPGVILRGYLDEIPRLADELTIPRNRKAAPDLTFAAIAFKHFPSLVTRCFLKLGVKAPKPASKGSSQSSEEVLLSSLGDDPIKLARGRRGYVFPAFTALRQWSPISSGEPVWKEFDIAAFKEALKSLNQFNQKTIERDEKLQSAKQTLNYMLGKSDTLPKSSDGDGETKAPSRPGKDARWPKVAELERELGENLNEGAWQLSRGSLRGLRDIVELWQKKPNASATELQGEVKRYQADDKHKREIGSVQLFLLLCEERYQDLWRSGSQHPDEEADDTVGILSDAVQVHQLEREVARFGDPIRLTPAEPAFSRRLFMFSDLTDKLAKVKFGESDGDCAECKVHFVDTAIALTDGTGLRETRVRINFTAPRLSRDELLGGAESRWLQPMTAALGLSQPQSDGKFDSAVALMPDRLSDGRIRHLLNFPVSLDSTWLHESLGKAAKWKGQFNGIKDKNLHLHWLGTAKDATKKNPWWESKAIIANGFTVLSNDLGQRSAGAWALLMVTCSKPATKRPVRSIGHDGKREWFAEVLKSGMYRLPGEDQQVQKNGAWVPEKSGKTGRMAEDDEYTAAFSLAKKLLGAETDEAVGSWLGPKGERSFPELNDQLIKIANRRLTRLGTYHRWSCFSPEKLDNLKRKANVIEGQIIELEAYQDKEVLAWRELLKAGDIAGFKDHAGRAFETLRSDLEDHLTNLANLTAPLRQKLWTWQSRPGDSKYGDLLMVDFEDSHPKVRGQRGLSMPRLEQLDGLRRLFLRYNRSLDREKYTPAKFGRADEGRTSGEPCQALLDKIDRMKEQRVNQTAHLILAQALGVRLRPHQVSDDERRDRDIHGEYEKIDGREPVDFIVIEDLSRYLSSQGRSPSENSRLMKWAHRAVRDKLKMLAEEPFGIPVVETVPAYSSRFHAHPENGQPGSRLHELHELATYQVQSLENLSAKTEPRERHRAKAASDLLEQFQAIRPENERRKELNRKRAKGVPALPLFTLYFPKAGGPLFLAVRDGKPVQADLNAAINLGFRAIAAPECIEVHRRVRATKEKDIYRPKLGNAREKAAFTKDDSISLDGVLSKKFGASSSPNFFLEPDGLVQVEGDPLFDRATLNGHTLVSGVALWSTVNNAIYPRCAELNRQRVKLWNLEDDIPM

SEQ ID NO: 3276 - protein, 1409 aa, unidentified
MNRIYQGRVTRIEAKKEDGTFEQVAFGQDQSTCPLWQHHTIFQDAVNYYLLAMASLAKEQIKGADKLMSDLPKRMVEAWETFPRTDAARAGARSLRDSVAPWIGLDGSSTIDQAYDSILNGNKVDKKALSYALALVLEECSGDSGIQQGGREYLPKLCVSDFDGTFDYSVSALASDNGKHRLGKVLHGNPSEGDLRKIASEMDLSWMVKISPEKFYEGEEAIKRLNQAIDHLELMIVSPSERLRAYLVAVPDAVERINSMRDAVKTMPEGFRVVRNKKPPSLDVLFSAIAFMAFPSFLTAACLKLGISETPASAESTKSKEGIEFASLGDDPVKLARGARGYVFPAFTALPRWKPANPGKPAWKEFDIAAFKEALKALNQFRLKTEEREEKKANLEGLIAHLIGSPIKGWKPSREDGEEGEIPDPIDPILLKLGWALEEEMTRGLSESVVGEKRNLSFGAGCIPHRDGGWTVTRASLRGLRDIVQEWRKKTAKNGPEVSTETLAKVVKNYQEREEKAASIGSVGLFLTLCEPRFRPLWMTVDEDEGDEAEENRFLRSLADLHDSVEEYERCKEAINLTPAEPRHSSRHYPFDDLAYANRKKGPTKKELQQNKQFLDEGCFDLEMIREERNGHLGKQSIRIHYSAPRFRRDGLSGSDREGWLQPMMKALDLKKIKTIERFDPSFTLMPEFGELCSLRFLLNFVAVIDPEPMQVALGKALLWNKQFHGFKEKKKTKHIYLHWPGTADPSKMKVTPWWENPSVVEQGFTVLATDLGQRTAGAWALLRVTASKNDSPRPIRSIGHDGKREWFAEILKTGMHRLPGEDAYMRNKGGLMEQEKSGKTGRIASEAEWRESLELAKALLADCPENWVGERPDEKSYSEQNDSLIVLANRRLSRLGTFHRWSCFDPEKESDPARRKSLVWKLVAELEQWEDEEVRGWASALASGDVAAFKESAGRAFAAYRYSLLPLLVRLAERVAPLREDRWEWIAREDGTPYGNLIRKPRDPGAVKPLVRGQRGLSLARIEQMENLRRLFLRYNRSLDREAGQPAAFGRADAGRSSGEPCRDLLEKIDRIKEQRVDQTAHLILAQALGVKLAPHSLDGKARLAGDHHGEYEKISGREPVDLVVIEDLSRYLSSQGRAPSDNSRLMKWAHRAIRDKVKMLVEEPFGIPVLEVPAAYSSRFSAVTGEPGSRCEERASLDDYLQELYGRRANTPPTAGHSDMRPWNRNLLGQFERLAGINATRLAAGKSPKTLLIPKTGGPLFLGAKESSVVQSDMNAAINLGFRAVAAPGALDLIHRIRSEKSSEQITTVAKSKREIAAYGGKGVPITIKGTSSTKLSKSANFFHDAKGIARFDNGEITLGGKTITVASGIGLWHAVNEAFLPRIVALNEERLMRILPVFDEKDEIPM

SEQ ID NO: 3277 - protein, 1378 aa, unidentified
MATRIYQGKIVRAQFEDPDEGGTKEVLMALKEMHELFQDAVNYYIVALAGMASDDCKEGSSLGSDFKERVQAIWGSAPKGKEGACTLKESICRTLCLNDATFQEAVDKIFAGCERKDILPYALQFIIDKTAAGAGAIQKQGRELLPKICDPEFSGNYDFSKEGRSAAEGNKKLREFLNSGNLDKDAIVATAMEMNLSWAGIKIQGEKTHEDDSIHEVKESMEGLLSVLKDHSNPAWAKLEIEQGRDFYSEVKEILKEEPLTRAPLMRNNKARLELRYATIFFMYYPCALSADLLKAQIKGVVGSKSQGSSLPYDYTDLEDDPLILTRGKRGCIFRGFSALPSWASSGENIMYNKEWDIAAFKEALKALHGFALKMDERRKRREELQDLINYMKSGQEGCKKGNPEDEQLVVFKGDIRYDLLLSVEQELSEDLQEGEFRLSQRSINGFDRVKEEWMRLIREGSGTEENMKKAVGEVQSQGGKFGSQLFFALLCKEKYHPIWRNDPPTDKFPRSKSILKDFVYLNELIEEEERLQEPVRLTAAEPQVSPRLIILSDMKKATEFIDGEKGGLKLRVIRRNERGLWQRTTAKVYYSAPRLERDHLGTDSDKWKSSTTYSEGIDWLQPMLKALELSDVVHLKQEENKSTKKSIKKPAVSLFVKTSPKDDAYSQSSDVVCLLNFPVSLDFKPLHHAIGKAEIWDKQFLGRDEKLHLHWPATYKGSNPAWWKNEEVKEKGFEILSIDLGVRYAAAWSIAHIHSDDSAPSFDAERLIGVADDVSWYGRSIRQGLIRLDGEFPATANEDKNTGTIRRANPDEQIRIRELFRICGLDIVDYESLEPDTIQIDLKTRNILSLNNSVLYIFRRILSRYRFLLNIHGYLADPLVEQEKQGKALSELKEWIRFVGPTNNENITSISLALKNDNRDLVRSSLGLEVSRLRKLLPEVAEKATNLILPRHRGRWMWCETLRGDKAVSSGVMRIVSFGLPNGSKKYIRRMGGLSVDRLTQIEGLRQRLQSMNRLLWQEIGKDPRKGRVSRDFPVIDPCPEIRIKIENIRETRVNKIAHEIVALALGVRLITPSRQNKNPKGKDIVHGEYERIPGRKPVSMVVLENLSTYRTSIDKDKRENSTLMRWAHRQITAKVVQLLGEVFGIPVIFTHASYTSKFDSVSSAPGFRADAMTEKRIRQELERIERRLKSRSTSEDEVLKRRLGQYLERLATIGNHGEQVSLYMPSPSNSGEFFISRDPQGRVVVRNADINAAVNIGWRALAAPQSLHLLHKIRMNKTAKDIQVVRANEREKGAFKKDGLQLSGLRIEDIEGSGPFNAFYDATAEWKKGKRGVSGGQESVSICYSKILWKEVKDNRWELCDELNSRILSKIGLNGK

SEQ ID NO: 3278 - protein, 1378 aa, unidentified
MATRIYQGKIVRAQFEDPDEGGTKEVLMALKEMHELFQDAVNYYIVALAGMASDDCKEGSSLGSDFKERVQAIWGSAPKGKEGACTLKESICRTLCLNDATFQEAVDKIFAGCERKDILPYALQFIIDKTAAGAGAIQKQGRELLPKICDPEFSGNYDFSKEGRSAAEGNKKLREFLNSGNLDKDAIVATAMEMNLSWAGIKIQGEKTHEDDSIHEVKESMEGLLSVLKDHSNPAWAKLEIEQGRDFYSEVKEILKEEPLTRAPLMRNNKARLELRYATIFFMYYPCALSADLLKAQIKGVVGSKSQGSSLPYDYTDLEDDPLILTRGKRGCIFRGFSALPSWASSGENIMYNKEWDIAAFKEALKALHGFALKMDERRKRREELQDLINYMKSGQEGCKKGNPEDEQLVVFKGDIRYDLLLSVEQELSEDLQEGEFRLSQRSINGFDRVKEEWMRLIREGSGTEENMKKAVGEVQSQGGKFGSQLFFALLCKEKYHPIWRNDPPTDKFPRSKSILKDFVYLNELIEEEERLQEPVRLTAAEPQVSPRLIILSDMKKATEFIDGEKGGLKLRVIRRNERGLWQRTTAKVYYSAPRLERDHLGTDSDKWKSSTTYSEGIDWLQPMLKALELSDVVHLKQEENKSTKKSIKKPAVSLFVKTSPKDDAYSQSSDVVCLLNFPVSLDFKPLHHAIGKAEIWDKQFLGRDEKLHLHWPATYKGSNPAWWKNEEVKEKGFEILSIDLGVRYAAAWSIAHIHSDDSAPSFDAERLIGVADDVSWYGRSIRQGLIRLDGEFPATANEDKNTGTIRRANPDEQIRIRELFRICGLDIVDYESLEPDTIQIDLKTRNILSLNNSVLYIFRRILSRYRFLLNIHGYLADPLVEQEKQGKALSELKEWIRFVGPTNNENITSISLALKNDNRDLVRSSLGLEVSRLRKLLPEVAEKATNLILPRHRGRWMWCETLRGDKAVSSGVMRIVSFGLPNGSKKYIRRMGGLSVDRLTQIEGLRQRLQSMNRLLWQEIGKDPRKGRVSRDFPVIDPCPEIRIKIENIRETRVNKIAHEIVALALGVRLITPSRQNKNPKGKDIVHGEYERIPGRKPVSMVVLENLSAYRTSIDKDKRENSTLMRWAHRQITAKVVQLLGEVFGIPVIFTHASYTSKFDSVSSAPGFRADAMTEKRIRQELERIERRLKSRSTSEDEVLKRRLGQYLERLATIGNHGEQVSLYMPSPSNSGEFFISRDPQGRVVVRNADINAAVNIGWRALAAPQSLHLLHKIRMNKTAKDIQVVRANEREKGAFKKDGLQLSGLRIEDIEGSGPFNAFYDATAEWKKGKRGVSGGQESVSICYSKILWKEVKDNRWELCDELNSRILSKIGLNGK

SEQ ID NO: 3279 - protein, 1035 aa, unidentified
LYQKLETYLNVEKLSEMFCLSYFNVVLTQTQIEVYNAIIGGKSLDDGSRIQGLNELVNLYNQKHKDAKLPKFKLLYKQILSDREAVSWLPEKFEKDNELLSSIQKAYQELSGIILGDSNLKNLLLNIASYDLNRIYISNDTQFTQISQRLFKDWGALHRVILEDLKSTVARGKKESESDYLDRLDKLVKKSESYSIGYLNQCIDKSELPDKPHVETYFTSLGAVHEETEQCANLFTQISIYYMEAQKLLTQEYPTQSNLAQDKQAVDKIKNLLDALKSLQHFVKPLLGNGDEPDKEERFYGELDSLWQEMEQITPLYNKVRNYLTRKPYSTGKIKLNFENSTLMDGWDLNKEPDNTTVILRKDGLYYLAIMNKAYNRVFKADILPDNGECFEKMEYKLLPGANKMLPKVFFSKSRIKEFAPSEKLLQHYADGTHKKGPNFSKADCHELIDFFKASIQKHEDWSKFNFQFSDTSTYEDLSGFYREVEQQGFKISFRSVSVSYVKKLVEEGKIYLFQIYNKDFSPSSKGKPNLHTLYWRMVFDERNLKDVVYKLNGQAEVFFRQASLTNDLTVHPAHQPIANKNPNNPKKTSTFEYDLIKNRRYTVDHFQFHVPITMNFKATGNSMINPQVYQYLKETKDTYVIGIDRGERHLLYLTLIDPQGRIVKQCSLNEMVNEYQNVVRKTNYHDLLDAREAERKQARQSWMTIENIKELKEGYLSQVVHLISQMMVKYKAIVVMEDLNMGFKRGRQKVEKQVYQKFEKMLIDKLNYLVDKDTDAEAAGGLLHAYQLTNKFESFQRMGKQSGFLFYVPAWNTSKMDPTTGFVNLLDTRYESVASSLSFFRRFKQIRYNEDKDWFEFKLDYNDFDKRAEGTRTEWMLCTQGERIITFRNKAKNSEWDSKSVRLTEEFKKFFYQYDVDIHGNLMDTILERTDKSFFEGLYALLKLTLQMRNSITGTDVDYLISPVMNAKGTFYDSRQSGSQLPENADANGAYNIALKGLWVLKQIWESKELKEVKLAITNKEWLQFAQEKPFLKY

SEQ ID NO: 3280 - protein, 1402 aa, unidentified
DWSKALWQHHELFQDAVNYYTLALAAMAAEVEGEGGDAKALRGWVARVRETWSTATRKAETFDGPQQRLAPLLKLAPKEADFDTAARAVLRSSRATPAKRAAAVQQLLVEKGDLNQVCVALLPWLATAAGKLDATSKSAASSQEARRQEIVRQFHQWPEAEALKRADSLELGLFLTQPPKMWVKGQEAAKILRDYFAKACAKFSELKPVEAAFEDFLKEKESQLVVPSPGRRPSGLYPIAAVFRFFPTAKTLAAFREATKTLAEAKDKEVHTDAVAEARVGDQPHFDYFTNLAFLGSEGDDERDTRAVWFEFDLAAFIEAIKAPRRYFEDTLKREAAAGRLRQQIAAMEARGQETPTDQEEGEPLPGFEGDSRITLLRDIVQNKLAWLAEAQGDVDAGPREYEIRERTLRGFAEVKKRWRAEAEKGSLTEARLLEILAEEQAAHRDDFGSATLYRELAKPENHPIWRDPGTQPWHADDPLAAWLDYKELQADLRDKERPIRFTPAHPVHSPRFFIFPKKSEAQPKTPSRRPSKPGLLSRHDPGQLSFTGGIVLRTGGGWVPKVVRIHYAAPRLCRDRIRSVGDSNLYEAPWVQPMVEALGLDKAPDRVNFANCRITLQPASEHDIQLTFPVEVNTEKIRKAVAREAAWQGQFNLHPDGDSFYPASLRWPHEKKPAKAPEPWHAQVGQFRCLATDLGQRDAGAFARLRAACDGSLNQRPSRLIGETNGRPWRAALERSGLFRLPGEDAVVWREMSRLDANNPEDSGQPFDFREELWGERGRPARPWEADDTAELMRLLEAIEEDANGQERPTLLPEDWRRALTFPEQNDKLLVALRRYQSRVSRLHRWCWLLQGDDRQTATAVAEVAECDDLRLVSPELKRLVETGDPRALEELQSRLRDRLERAPRLLERIANRILPLRGRSWRWEKHPRATPENPLYHLTQGGERLDSAGRPVWLRGQRGLSLERIEQIEELRKRCQSLNQTLRRRIGGEPPLRRDESVPDACPDLLEKLDHLKEQRVNQTAHMILAEALGLRLAPPPPNKRALRSERDQHGVYEKILDPQGQWIGPVDFIVIEDLSRYRASQGRAPRENSRLMKWCHRAVRDKLKQLCEVFGLPVLETPAAYSSRFCSRSGVPGFRAVEATAGFTAQGQWAWLAAKKDDCGNPTEEARRLLDVDRELTQAQAELERDWAEQRGSGPCPKRTLLVPFSGGPIFVPISDKADGADLQPAVAQADINAAINLALRAIADPKLWSIHPRLRTQREAGDKPGKGRKPKAGPAGPQPASAARFLTREKRKFGETGKPLEVRWPSNAKPDDTRQPNFFADFAGLAALAEQLGQQNREHAWLAREWTTAEIPGERDTPPLVHGRSLWGCVKAAQWLRIREINAAKLARWKSKLDRMPD

SEQ ID NO: 3281 - protein, 1365 aa, unidentified
MQKSLENFTGLYSLSKTLKFELKPIGKNGKPLKEQESDQIFKKIIDQDKRIKQAYLALKPVLDKIHEDIINKSLSSEAAKKIDFFSYFEEYKKGKDRNLDALEYTLRNELGKAFEKTANNFAENASDDEKGKPIFKKNKDKHEGVKYLTQSGILKYIEKNVKEFVPENEIKEFVEAKEIINEQGKKEIERTGHLAVLNSFFTYFSGFNQNRENYYVTKEEKATAVATRIVHENLPKFCDNAIQFYSSRKEEYLGALEFLKNNNRITKIKDAQTNTMIEAKAIVEDCFKIERFPYCLAQAEIEGYNKVIGHYNLLINLYNQAKKADDKSFKNLPPFKTLYKQIGCGEKKALFFELKFDTKEEQQKANEYSDSPLNLQETIELISEASKKYFQKSTNDSDVTIYSFIDWLKNNTDWNGVYWSKAAVDKVSNKYFANWHEIKDRIQSTLGSKDKAQKELLSSVASFDKKREEQLKIYDAVELSGLFSVLNQPTETGWSKVFFKESILSDRSSLIDEKLSPSENVINLICADLEDLATEFLSKSDAVLKITDYKHKDNVLVIKEWLDTAKYVLWLIKYFEVKAGKVKGNNINPELTVLLDSILRTKDADWLDWYDVVRNYLTKKPQDDAKKNKLKLNFESSSFLNGLSQDFDAKAGLIFEKDGLYYLTINYKLSKEDIIELKKVNGETVKRIIIDFQKPDNKNTPRLFIRSKGDDFAPAVTKYNLPINDIIEIYDTGKFKTEYRKKNEQEYNDSLKKVIDYFKQGFLNHDSYKHYNFAWKETAEYKDISDFYHDTEVSCYQIKEEQNSWKNLMRFVEEEKVFLFQIYNKDFSKEKNIGGKDNIHSYYWKSLFIKSAVNKFGTQGAEIFFREKSIEYKPKFDNGREEGHHYKELKDKFKYPIVSNRRFTANKFLFHCPIILNFKSNEKREVSEIVNDNFTQTTDIQFLGIDRGEKHLIYYSLLNANGEIIEQNHLDIINKKDYLKAINDAAELRRKKQENWQQKGNIANLKDGYISLVVHEVIQKMKDENGNFKPTFIVLEDLNTGFKRSRQKFEQSVYQKFELALAKKLNYLVDKNANNGEIGSVTKALQLTPLVSNFGDIENRKQVGVMLYCRANYTSVTDPVTGWRKTIYLKKGSEEAIKNEILKIFDKIGVDENGDYFFEYKDENTQKTWTLWSGKNGKSLERYRAKRGKDKNEFIIEAIDLKTLLDQLFVNFDKSKSLKKQIEEGKELPKINEHTAWETLRFVIDTIQQIRNSGDVSKGQSDNFLLSPARDEQGNHFDSRLYEKQENPKLPKDADANGAYNIARKGIVMYNHIHQWVKDGKPKFEKGTDLDLFISDKEWDLWLSDKEKWQSELKTFSSKKSKKKQ

SEQ ID NO: 3282 - protein, 1260 aa, unidentified
MNKDFTNINKVTKTLSFSLIPVAETLDNVMKDGIITADDNLATSYSKMKNTIDEYHKWFINQSLSNVKLSLLEEYFRLYNQKKERKDDEYFAYLKVQLRKEVADIFTSNKYYSTVFGKDLIKKDLPLWINTYRPDLYFDESFKSHTTYFTHFNENRKNVYSPDEISTSICYRLINENLPKIVENINLYNIIKDIIDFTPIESELAEVLQGERLDEIFTIDYYNNLLNQTGIDFFNTIIGGFVSGDKKKKTKGLNEYINEYNQTQKDKKLKIGKFKILYKQILADKSSVSFKPNGFVDEKDFIDSINSFYLTVLECNDKDGITINVLDEIETLFTNISSYDLDKIYLSNNTLSDISQAIYGNYTVFKSAINAYYDKHLSDAFRENTTPRKGVTKKMIEDATKDKEKWFKNNFSISWLNQALDEYIEILDDDNEFRNKHKNNVITTYFTELFSNKYNIINDIKSKYNDIKDILNITTEENLVKSSDEKISKLKSFHETVLSLRNILKTINCDEPGKDMYFYPNFEYLYTEISRIIPLYNNVQSFLTKKPYSTEKFKLNFDNSCLLDGWDKNYEHRKGGVLFRKDGNYYLGIINKKHNKIFREYPVLDTTENAYEKINYKLISGANTMLPKIFFGSTYNVPDDILRIRNTGSHTKNGITQKGYEKADFCLDDCHKMIDYFKECIKNYKIWDVYNFNFDETTSYTDISLFYKDLEDQAYEISFDNIPDEYINEKVANGELYLFRLYNKDFSEHSKGTPNLFTIYWKALFDEDNLKNVVYKLNGKAEMFYRKASIKDVDKIIHPKNQPIKTKHPDVFKTNTFPYDIVKDKRFTYDQFSLHVPITINYKAKDKRNINHDTLAYLQNNPDVNIIGIDRGERNLLYVTLINQKGEIIRQESLNDIYDEKTSITTRYHTILGYREKERVDARKNWSVIGNIKDTKAGYLSQVINIITNMMVKHNAIVVLEDLNTGFKNSRLHIDTQIYQAFEEKLIKKLNCLVFKNKDKNEIGGALNPLQLSTQFKTHKDIGKQSGFIFYVPAWNTSKIDPTTGFVNLFDTKFDNISQTKSFFAKFDSIIYNENKGRFEFTFDYKNFTNKVGDSKSEWTLCADNTSRYIYNSTNKTQEEVKIANELCLLFDKNNIDYKTGLDLKVAINSDNNSSAFYKRLVQLFKSLVSLRHNNGGKGDNEKDMIISPVENENGIIFNSDNALPSQPNNADANGALHIALKGLWVLGEINKSTDLFKTKLAITNNKWLQFVQNKEYQNI

SEQ ID NO: 3283 - protein, 1252 aa, unidentified
MTLQKFTKQYALSKTLRFELVPQLETLNWIEKKGLLQEDISLAEKYKLVKGIIDRYHKSFIEQALANAKLSKLEEYRVLYSKRDKTDADLKDFAKLESDLRKEIAKQFAKNSDGNISAKFGRLFKKELIKEDLPAFASNADELELINAFDSFTTYFEGFHTNRENMYSAEDKSTAIAFRLINQNLPKFIDNMAVFAKLAESPIAEQLDKIAGDMSPFIQVHTIEEMFNMPYYNDVLTQKGIDIYNYVIGGYVSEDEKTKIKGLNEYINLHNQQQADKAKRLPKFRMLYKQILSDRNSVSFLPKEFADDQQLLKGIEGFWQELNTTVLAPADKDSLSLLQLLEGIKQYDITQIYLRNDAGLTDASQKLYGSWAVVKDALTQEYLKAYSGKAAIGSEKFEEGLEKYLKKPKSYALAEIDAAIAAMTSDESLPSTSTYYANVQHYAALQNLQQLYSQCSDVLNAYPQGKNLLNDTKAVEAIKALLDSIKQLQWYIKPLLGSGTEPDKDLSFYTHLDKLWQTIDQVNPLYNMVRNYLTRKPYSLKKIKLNFKNSQLLAGWDDNQKEANSSILLEKDGQYFIGIMDKSHNKIFRKVPSVAGQVCYRQMSYKQVSGANKMLPKVFFSAKRIDDFAPSAEVLRVRNTASFTKSGKPQVGYEREDFSLKSLHTMIDFYKASLAKHADWQVFNFTFRPTEQYTSIDAFYREFELQSYTVSFTDIPASYLEQLVAEGKLYLFKLHNKDFSPYSTGTPNMHTMYWRMLFDPQNLSNIVYKLNGKAEIFYREASIKAANTITHPAQQAIDNKNANVQALKPASTFQYDIIKDRRFTVDKFQFHVPITMNFGAAGGNIVSPLAYAYIKQNDKQYVIGLDRGERHLLYLTLIDCDGHIVQQMSLNDIVSSYANGDVKVNYHNLLDAREGAREDARKNWRTIEGIKELKEGYLSQVIHVLTKLMIEYNAVVVLEDLNSGFMRGRQKVEKQVYQKFEKMLIDKLNYLVDKKAEPLAEAGVLNAVQLTNKFDPKFKGGVQNGMLFYVPAWNTSKLDPATGFVNLFNLKYENTQQAASFFAKFDKIVYNKQQGYYEFHFDYSKFTDKATGTKTQWVACTHGSRILSFRNPEKNGNWDSKEINLTEHMTALLHAAKVDIHAANLQEVIIANGTKELLKSMLDTLKLVMQMRNSIPNSDIDYLVSPVCNSQGVFFDSRTAPTTLPQNADANGAYNIARKGLMYVQAIQSSEDYKSCKLRISNKDWLGFAQQG

SEQ ID NO: 3284 - protein, 1333 aa, unidentified
MKKDKKEFKSFGDFINLYEVQKTLRFELKPVGKTEELLKINKVFEKDKTIDDSYNQAKFYFDEMHREFINTSLTGISPNVIQPLIKAFIEKGKQEERGDKRASGKEWDKARKIFCVKIANIFNMKAKEIEREHGIPKDERKGIKYLLSAKILDHLKQKFPKEKNNEFVNKKWPKLFVKNQATGEEQYIFDSFDKCTTYLGKFQKTRNNLYAANDKATSVASRIIDNFVIFQGNKNKFENKLRIILDKENFTSTEQDVFKQNYYIKCFVQDGIDKYNEVVGNINKKIKEFRDREEKKAKENRREFKKGNYPLLIKLDKQILSYKDKEKELIENDEDLKKVFEDFVKNNNRKFKKGKDLLNNFCDGKFAEEYGKIYLQKKVLNTISRKWFIDANAFELLLPQTSGKQKDENIASIKKYISLSDIKSALEKEEKDGGLSGNVFKDKYYDDEWSKFKSSKLPEKRFEHFLVIWKFEFANLFQNKKLSDGSLIKGYDSCLKETEKINWGNLSQKNKKEELYKKEIEKVKQYADVSLDIYQMLKYFVLGGKDAPIGSDLFYGEFNDYYQDLEFSRYYNALRNYITKKSFSLDKIKLNFENGQLLNGWDKNQEKAKFGIILKKDGLYYLGILMDKYKDIFENIGEDMSGDFYEKMEYKFFPDPKREIPKIAFAKKNKEKFGLTEEIEEIKKEYENFQKEKEDQDNWKNEFDKNKCAKLINYYQKCLEIGGYKKEYDFSWKKPEEYPGIGAFNDDIARQNYKITFKKINSNYVDDKVSNGKMYLFQIYNKDLSEQSIGKGKNIHTLYFTNLFSDNNLKNPILKLSGGAEIFFRKKADNLSLKKDKKGKKVFDHKRYSEDKILIYVPIKLNRGESRSFNKQINLFLSKNEDVNIIGIDRGEKNLLYYSVINQNGEIFDQGSLNIINGVNYFEKLSQREKEKIEAKQSWNQIEQIKDLKKGYLSWAIHKICTLIEQYNAIVVLEDLNMRFKQIRGGIEKSVYQQFEKALIDKLGYLVFKDRRPEEPGGVLRGYQLVAPFESFEKMEKQTGILFYTQADYTSITDPVTGFRKNIYIGNSWSQEKIKSAINKFKSIKWNDEIGCYAFTYNPADFVYKLKFKNKKIKNNLQEMISREWTVCSGVSRIERFRNNAGYWEYNVVDLNEKFKELFNLWGFDVTGDILKQIQEKEANKQLAGDKLIDGTGRDFYHRFVYLFNLILQLRNSFSKKIIKDEKGNIKEIGDDIDFIASPVHPFFSMGAKSKVRGVISKTNLAGFEEKIRSNNRNEIVKNLNGDANGAYNIARKGIMILERIAEKPEKPDLYIAKNEWDKFTQNQWNLISKSQK

SEQ ID NO: 3285 - protein, 1331 aa, unidentified
MENFINLYSVQKTLRFELKPEGKTLETFNKWIEEIENKNANENSNLIQQDIIRANKYEKVKKIIDEYHKNFIEQALKRLGNNGLPGLEEYYEIYKKRERDKNEVKMFNDIKARMRHHISKALKAHEGFSNLNKDDLIKKKKDANESLLENFLNQNEKVRNKLNELLRDNEGDRVDLFELLRAFENFTTYFRNFHENRQNLYSPEDKFSTIPHRLIHENLPRFCDNIKIYNQAKAARLNMNDIEKELRLNNNSLDEIFSINYFCKTLTQSGIDSYNYIIGGGAIQSGSQNIKGINNFINNDINQNVNNSSGRIPIMKTLYKLPLFERTSYSFRYEPIENDKDLIERIKNFYYEDLKNHRDVDDNENNQVNVISAIKSLIENIHDYREGLYVNGGITLTQISQKIFGSWHYIRDVLSEYYDKSIAPVKLDKKRTKAEEKAKEKWLKQKQFSVKLIEDALCAYKEKETNEEIIKKITETTICDFFKLAGADDNGSNNLFERIESKLTIKNEYDESLADLLGKEFQNERNLMQDKPRTLLIKNFLDTLQGYKDDITAGLLHFIKSLLPSEEISDKNELFYSEFEKYYNILKEVTPLYNKIRNYLTQKPYSVEKVKLNFENNTLLAGWDENKEADNSCVLLRKNNNYYLGIMKKEFNNVFKKDKYLIANDNEPCYEKMIYKLLPGANKMLPKVFFADRNINEFNPSEEILRIRNTASFSKNGTPQEGFNKAQFNLEDCRKLIDFYKKCISNHCDWKNFNFQFSDTDSYQSIDEFYREVEQQGYKVNFVKIPDRYINQLVDEGQLFLFKIYNKDFSDKKKTNGKPNLHTLYWKMLFDENNLKNVRFKLNGEAEIFFRPKSINYTDEIWEKGHHYDKLKDKFNFPIISNKRYALDKFHFHVPITINFKSNNQENINEIVNNYLKNSDKYNIIGIDRGERNLLYVTVINLKGEIIEQFSLNEISTNYRDKCFSKDYHEELDKRESQRDRARKDWQTIEGIRNLKEGFLSHVIHKISQLVIKYNGVVVMEDLNFGFKRGRQKVEKQVYQNFEKMLINKLNYLVFKDKEPDEPGGVLNGYQLVNKFKTFKELGKQSGIVFYVPAAYTSSIDPLTGYVQYLFPIKHANSVEKARNFYNKFKSIYYNPEKEWFEFVFDYIDFNIRFEGKSDWKICTANTERYVWNKNLNSGRGGQEKINVTEGLKLLFREYNILYCDGKNLRELISEVRSINNENTDKKFYNRLNYLLNATLKLRHNNGKQGAEEKDYILSPVKPFFDSRSANKTLPKNADANGAYNIARKGLLLIKRLKELGVEEFEKTKKSRGGRSQWLPHKEWLEFVQNR

SEQ ID NO: 3286 - protein, 1481 aa, unidentified
MDGTAAPTAKPAAPEAPMTQRAYTLRLRGAKSQDNAWRDALWATHEAVNKGAKVFGDWLLTLRGGLCHELAEPAPPPKGRSRSDKETEEQRKNRRILLALSWLSVEDACGAPNGAVRIASGTDADSVRREKLLTELRRILEGRGLDRSAIEVWVSDCADSLSARIRDDAVWVNRSALFDAATQEIGTSLTRDEAWDILEPFFGSREAYFADVELTEDVTPAEEKAKDLVQKAGQWLSSRFGTGTGASFESMSIVYAAMAEWAKKANAFESGTDALESLARSLTRFQPKTNNASGILGLISGPGYKSATRNIVKSWEGRTAGVSREDLERFEETAIKDEQNARANVGRKGRRPWSDRMLKDVEAACGFTYLQANGPARHKEFAVMLDHAARRVSIGHSWIKRAEAERRRFEADAQRLSKVPDAAEEWLDAYVQERSGSAGGEYRIRRRAIEGWDEVLKRWKTCATEEDRIAAAREVQADPEIDKFGDIQLFEALASDDALCVWRNGNDVAPDHLKDYVFAHDARFKQRQFKVPAYRHPDALRHPVFVDFGNSRWKVEYSALEAAKAARSERRTGAQDAEWLKIPRGIRLGLWDGEGVRDFELGWSCKRLAADLALQQAAHNGPTRSVSRADRLGRAAAGLKPEESPSPAGLLTQAEWNARLQASRSQLNDLAAYLDRNNGRWDDKAKKMRDRLAWLVTFSAKLECRGPFMDYAARHGITPNRKGEYYPNADRNKADKREGHAKLMLARLPGLRVLSVDLGHRFAAACAVWETLSRSAFDNEIAGRYVIDGGSGEDDLYLQTRHTDHTGKERTTIYRRVGGDRLPDVSDHPAPWARLDRQFFIKLQGEESPARKASPDEIETIRRVESDLGYVREAHNPLPTEIDELLGEAVRLVRLGLRRHGDAARIAYAFHPESARLTPGGGVEAHTPDTRRQAILDALIRWHGMATSERWNDRRAMEEWRVHIQPLLATDLPALTADADRWERKRFRNRLEAALTPAATALARDGAAALHARWSERWRADDAAWRPRLRQLRRMLLPRGLRPVDGDTDAQAAARKARRGAARHAGGLSLTRIATIRELYQVQKAYAMRPEPDNPRKNIPGSNDDRFAEFGRSILEAVERLREQRVKQLASRIAEAALGVGRVRQAGDRDRKRPMSPVDAPCHAIVIESLRNYRPDELQTRRENRALMNWSAGKVRKYLEEACQLHGLLLREVMPNYTSRQCSRTGLPGLRCDDVPIDEFLTAPWWKKAVDAADKRLQENGSDSLDRMLVALWDKWDKCSGASDQDRRRQRTLRLPRAGGDLFVAAPPSSCRAAGHRPCPRCNPRRAVQADLNAAANIGLRALLDPDFPGRWWYVPCIEDKAAGTAVPRADKVKGSMCFGTDPSKPEQFGSLLKPSDGDSSDGQARSARRQGTRSSNSDGKETTNFWSDPRAAALRNATNGGFWLPTPAYWRWVRKRVVAVLWQANGLSAPPADLVRDGQP

SEQ ID NO: 3287 - protein, 1284 aa, unidentified
MNDFSAFTRQFPVQKTLRFELIPTGKTAENLRNSKFFEDDENRSKNYVKVKALVDDFHRRFINESLADCEIDWSNLSKAHEERKKNENDLKSVSNLESIARKYRQLIRNQFTGEPGKENPILTEYGIEFKDLFSEKLFSKVLSIDAEKSNSVEDKNALDTFDKFSGYFIGLHENRRNFYAAEKQITSAISRIVDDNFPKYCNNCSKFNALLEEHPDIVEELTAELGKDPKPYFQIENYNRFITQKGINEYNDVIGGHFVQGNEKKVQGINEILNLKHQQNPEFKLQMTHLYNQILGGAEGYSYIPKQFDNDSELIDSLNDLIKKIDDTGSLETLCSTIGNLENYNPSGIFISQSELALFSRLAFGRWDRAEDLLRKWRANELGNPNLENSEKVDKWIKSPEFSLKTIIEASEFGETKIDYAEFHRKFEEIEKEASGNISKTESLRGERILGNEANSEKVKSILDLYIEAIKIARIFRADEDLPRDEKFYSDFDQSFQTISETNVLYNKARNFCTKKPYNEKKFKLNFGNQNLADGWSITKEMADTAVILRKNGLYYLCVMNPSAKTDFSKLPMEGDSGYYEKMNYMQIPDPSKMLPKVLMPSKSQGPHPASDYIKEGYSAGKHKLGDNFDLKFCRDLIDYYKEGIKCYPTWSGFDFKFKPTEEYANIKEFYSDVERCGYKISFIHVSKSAVDKLVDEGKLYLFKIYNKDFSPDSKGTPNMHTLYFRAAFSEENLRSPVIKLNGNAELFFRKKSESMNKIVHKKGTIIINRTYRDSNGVVKSIPNSAYYEIFRFKTGQISKLSPEAEKYLNLVQSKTANRDLVKDRRYLEDRIFFHVPLTFNFTADNNALSLNKKIIDWALSDKDLRIIGIDRGERNLLYYVMTDRSGNILEQRSLNEICHIDYHEKLVQRENERTLARQNWTQIGKITDLKDGYLSQVISFLADRVVKEHAIIVLEDLNYGFKRGRFKFERQVYQKFENMLISKLSHLVFKNTEDGLSPGGVLNAYQLARPPESVKSNQRQNGVIFYIPAAYTSKIDPTTGFVNLFKSEPASVKGRKEFIENLNSIRYDSIEDCFVFEFDYRKFAVNKDLKNVWKAYSLGERIIYNRTDHTYSKVRPTEELKKDLKEAGIPLEGDLKDAIAKSDKSVRSALRALRLTLQMRNEDENEDYIISPIRNSNGEFFCTKNGMKGLPLDSDANGAYHIALKGELMLRMMADSYLGDDSKPNIPFVGDKEWLTFVQSGRETWKNRSRYRTSTISASARHRFTITILCRGERTSNSNAAIR

SEQ ID NO: 3288 - protein, 1464 aa, unidentified
MADKKDPVTQRAYTLRLRPTDKHDRDWREALWQTHEAVNKGAKAFGDWLLTLRGGLDHTLANAQIECGKEKPPRNPTDAEAKARRILLALSWVSVESKLGAPEKFIIASPQDAAEDRNRKVLAALEEILATRGVQQNEINAWKNDCSASLSAAIRDDAVWVNRSKAFDEACDGQNKQQGREDARIVLWYLLTEDYLTFPTKKAEKNPSGPSDQEEEEPDSGEGGDAVAKSGKGAGQRTRHLFSHIFGKEKTEGFGEKKHTLTLRSHWKNHLKPLVEAAGIPLGDPNTKADKDESLSPTEFHREMFSKAAARLAQIWTKQKQQEAERERRTAADHELGNLEKDPAYDTALKLLDTLCSERGQSTGSLEEYQINPRAIAGWDRIVAAWEKITETDANQATEKRIEEAKRLEGENPDKKFGDINLFVSLAESKYEPVWWHNGQAMPSILKTYVTGWKARMDAVRLKVAAFRHPDPCFHPVFCQFGVSRPQIVYSRLKENRKDDPRKVEMRLLSGNRATDRTLLAVSKRFDKEIGSISIEIPASGTSRSVLEVSRRSRMGIAAVAGLNGSAVCRVAHVFDEQEVKSRKRGDDDRANNEARGRKHKKPSWNGTLQADRRELEAIGRMESSRPEKAREAKQRLRWWLTVSLELQRKGPWYDFIKNSSDKTAFTRIYKSGKNKGNEYVSQDGWPHERADYTSKGHAPLILSRLPGLRVLSVDLGHRYAAACAVWETLSREAVHQACEQARCPQPTESNLYIHLKRKVPKQRNGKEVVVEETTVFRRIGPDKLSGDTPHPAPWARLDRQFLIKLQGEEEGVREASNEEIWAVHRMEAEVCRSVPLIDRLIVAGWGQSDKQRKRLDALRKLGWKAAGGAEVSGGTDEDEGEVRKPSLSVDELMFSAVRTMRLALKRHGERARIAFAMTAAYKPMPGYRKYYFTEAKELSANDDPITRTNKHIEFIRDALVLWDGLACSRGWRDDAAKQLWDDHIAKLSGYKAPEEIGEDASGVERKKKQKENRERLHDDVAKALAEDATLRETLHTAWKTRWEYDDERWKKHLRWFKDWILPRGKAANDLAIQKVGGLSLTRLATLTEFRRKVQVGFFTRLRPDGTTAEISEKFGEATIEALDRLREQRVRQLASRIAEAALGIGSENPLHWEAGRRRPTRRIPDPRFAPCHAVVIENLTHYRPDQTRTRRENRQLMTWSSSKVKKYLTEECELYGLYLCEVPANYTSRQDSRTGAPGVRCVDVPVAVFMNSVWWRKARMSAHKRDEAGKATARDQLLLKLEQQWQSKTPEELWAAGTLRLIQPGGEIFVSSDLRSPAAKGLHADLNAAANIGLRALTDPEWPGKYWYVPCDAHTFKPVAERLRGCTAIDLKKPLRNPPAVEVAGAQKTTRGRKPRMAGKSGQVVVNLWRDISASSIKQPCDNWQEHAAYWGEVEKKVAENIDRARPARQSKTSDDGEDQIPF

SEQ ID NO: 3289 - protein, 1464 aa, unidentified; identical to SEQ ID NO: 3288

SEQ ID NO: 3290 - protein, 1465 aa, unidentified
MPQQNKPPVTKRAYTLRLRGTGSSDDLSWRRALWQTHEAVNKGARVFGGWLLTLRGGLDHTLADAAAKGAKEKAGGDPASEERKARRILLALSWLSVESKLGAPAKYIIPSGKVAPAAQNGRVVEALEEILKSRDVPDKEIEEWKNDCQASLSAAIRDDAVWVNRSKAFDEAVKLIGCSLTRDEVWDMLERFFGSRDAYLAPAKGSEDESSETEQEEKAKELVKKAGQWLSSRFGTGKGADFSRIADVCEKIAAWAEHAQADTTGNEAINSLAAALSENDLKGVLHLISGPGYKSATRNLLTRLAAKVTVTQQDLAGLKDKATSDAQKCKQKSGSKGQRPYADAILKDVESVCGFTYRVDQDGKPVSVKNYSKYDDDYSWGSARHPKFAVILDHAARRVSLAHTWIKRAEAKRRRLEEDAKKIGQVPENIKKWLNHFCSERSQASGALEPYRIRRRAVDGWKEVVAEWSKSSCSTSTDRIAAARALQDDPEIYKFGDIQLFEALAEKDAECVWHKDGDTKKAADPQPLIDYVLAAEAEFKSQHFKVPAYRHPDALLHPIFCDFGESRWDICFDVHKNVQTHFARALCLTLWTGSGMAIVPLCWQSKRLARDLALGQGGQKDGASEVTRADRLGRAASNVTKSDEVKISGLFEQADWNGRLQAPRQQLEAISRHVEEHGWDEKTTSLRDRIQWLVTFSAKLQPQGPWCEFAKKLQLISNPQYWSPADTNKNRKGHARLILSRLPGLRVLSVDLGHRYAAACAVWEAVNAEQVKRACLEAGHEEPKASDLYLHLKRKVTKQKKGNQVEIEKTTIYRRIGADTLPDGTPHPAPWARLDRQFLIKLQGEEEEAREASNEEIWAVHQLEADLGRTSPLIDRLVRAGWGQSGKQKARLDALRELGWKQASEAGVSDVAGVDEGGPGRPSLAIDELMSSAAGTMRLALKRHGDRARIAFAMAASENERIESIQDALMLWHGLTSSRGWRDEAAEQLWDDHIATLPPYNAPETIDEKSTGPKRKKKQEDNREKFHNVAEALAKNGELRAKLHEAFEERWKKDDERWKKQLRWFKDWVLPRGKHAGDPTIRKVGGLSLFRLATLTEFRRKFQVGFFTRLQPDGTKAETRDHFGQRALEALEHLREQRVKQLASRLAEAALGIGRVKRPMGDKDAKRPNVRVDEPCHAVVIEDLTHYRPEQTRTRRENRQLMTWSASKVKKYLSEACELHGLHLREVPAGYTSRQDSRTGAPGIRCQDVPVYEFMRSPFWKKKVEQSLAKLAGNKDDALECFLCDLNEKWKCKSEADRKKAGVVRVPSKGGDIFVSADSNSPAAKGLQADLNAAANIGLRALADPDWPGKWWYVPCDPASFKPVPDKAKGSAAISLGDPLKCAAAVRGDGTRKKPGKAKSQAREVVNLWRDASSSALTCTAAGEWREYAGYQKDVQSRVMSILKEQMKEPGGRTPVEARDDDVPF

SEQ ID NO: 3291 - protein, 1408 aa, unidentified
LKGDRLTLWRNHVIFNRGVKSWGEWLLNLRGGLPASLADHKDLLTVAKGDVVQAVKERTAAITPAVIRQEPKFEAATEKKVREEVAARKKKITEAAVARDLLATRRSELRRILALSWLCPETPLQLVPQAAVVAAADDSDREQKVLDRFRQILKQKGVADVAGWLLDCDATLRAAIRPDAVWVDRATCFTKIPKAERPSEDDAAKHLFGLFGSVTEYFATAAAGESEDKNFSTTAGNWVSKNWGEGAKSDDAAIIRALSKLVVIARSSAVGSAGTKLVGRMLAKIGADPSGDFRDLCAAIGWRGKPNKTRIALEKLSATGRVSAALWDRFAEVGAEEIELRKAAKGDEVPAWATAMKSSLPGTVGLPFKPLTGRSHHFEYATMLAFAMRRVSQIHTKAKQAEAERQSFTPEQDRVALVPPAAQRWLDNYVEARTAATGAIDGYQLRRRALGGWSEVAAAWAGCNTSADRIAAVRELQADMEKPGDMQLFEALAADDATCVWRSEDGKWDSSILIDYVRAAVADQNAVRFKVPAYRHPDPLRSPSFIGFGNSQWSIAYSAQAEVRERKKHLERAGKSEKDADRAREALASEPVLQQVALDLWGLGEMRTIEYRWQSTRLLNDLALGSVRDLKGEKVSRATRFGTAGAAGGPFLLNGIDDDATWNGRLQAPRRELEDLARSLDAQDLPYDDETKWPAKLQARLQRVGWFLSHSAKLTPSGPWLDYVAKGLSGGWEWATGRSGSYLFHDDNKARKGRAKLILSRLPGLRVLSVDLGLRTSAAAAVWQVVSRRELNAAREAADSITEADLYCFARSGGRTQVFRRIGPSAWARLDRQFLIRLDGEQSAARPATNDEWNAFQDLRAWLGCLREDKPERLPPVDRLQQQAERLCRLGLRRLADLARVAFLLSAKTRPIMGGRTEPLNGEGQIRAAQDALVLWHSLASSDEFQDLQLRQLWQAHVSDGPPLVGRLTKKQRQEVRDALRPAAERLRGNAAIRGKLSSLWEKRSMEWGKRLRWLRDWVIPRFSKRTKGERVRLARKVGGLSLDRIATIRGVYQVMRAYASRPEPTNLRAGVERLEKAAAQKLRPEFGRRMLAKMERLRENRVKQIASRIVEAALGVGSEDRLHWDKGRKRPTATIADPRFAPCHAVVIENLENYRPDDKRTRRENRGLMNWAARAVHKYLVEGCELHGLYLRQVSPSYTSRQDSRTGSPGLRCNDIPVKELANPEGWIGKLVARAEEAVKEGAATPRQKLLATLAEAARSGEITSSAVRIIAPGGQLFVAADFASPAAQGIHADMNAAANIGLVALLDPDWSAAWWRLPCKTATGEVDETKVGGSDAVPVGKPILDPSAEAGKGYVNAWSDPQEKAVGRRDWVDTKAYWRGIEERVVEILLACNRSGGRARQGKLPF

SEQ ID NO: 3292 - protein, 1484 aa, unidentified
MNRIYQGRVTKIDILSEDRKNPTVVDTFESYELNQSSPLWKHHETFQSAVNYYIVALASLARGISPNDNDPSPEQRLASDLLNRVHKSWENFPRSYYGAVPPKSLRTSLKDWLQLDDSSSANDAFNRILQGNDSPAATLHQALFLLLDKCGGESAIQQGGRGYLPRICDATYTGSWDLDTTAIDSSSGKDRLAATLHSEHSGHDITKLANEMSVSWAGIKCKPNEKISGDLLRKRLEEAISHQLKRIEAPETIALRQALDLFPDAQDELQRIKASLPTLPDSLELDLNKGGNISWDLVHSTYLFKAYPSPFTAKLLSLSIKKPTSSTKANNTKSYQSLEDDPIKLARSTRGYIFPAFTALPAWSPVSPGKPVWKEFDIAAFKEALKSLNQFNQKTSERAENRAYLKGRIAVLLGSKEESWKPRKTESGETEDLPKPLDPTLLNLADSLEERLTNELADTVVNREGAKILTFGQATRTLIPGKWQLSTASLRGFSEIAKEWNKLLDQKGASVSEDDLAAVVKEQQKSEKNKKSIGSISLFLALCDSEFHPLWREDGKTDADESDRLTSNRILHKVTELHQAIRDYERAQEPINLTPAEPRRSRRLYMFSDIGGKEKVIFKNSNVIETSLALFEGSGCAIRRVHLHYSAPRLKRDELIGGDTSQWLQPMTKALGIEPGETSPKFESAVSLMPDFTSNGETRFLLNFPKTLDSTRIHKALGKSPIWNGQFNGIQNKNIHLHWPATASTKPSKENPWWKNPAVLKSGFTLLSVDLGQRTAGAWALINVTPWKPESNKPVRSIGHDDSREWFAEIQQTGMHRLPGEDQQVLAKGGRFSREISGKAGRNSSDDEYQNAIKLCQDLGCSGSEEAKAWIGKTVTEKSLPAQNDSLLVLANRRLSRLATFHRWSCLHRALSEKSDDSKSQIRMTASTLAELSYWQDAEVKNQLKQLIEHYPYLEVLLPETEPTNGNPKKKRRSTSAKLWSAVELAAWQNEFHPDHFAGFSSAFGTIQTSFRDSLLKALVTLANRVTPVRGKTWNWKTRTTKDQDAAPYGELLLEEIRGEKTPLIRGQRGLSIARLEQLESLRTLFLRINRAMDKLPGKLSKAGYGFTNDAGEPCPELLEKIERMKEQRVNQTAHLILAQTLGVRLKAEKQDAKTRRESDIHGEYEPIPGRRPADFIVIENLDRYLTTQGRAPSENRRLMKWAHRAVRDKIKMLAEEPFGINVVEAPAAYSSRYCARTASPGSRCVEKAGLDPFTRDQLLKKSGAAPSPGHPDLRSLYQSLLGQFEQLDQANQERRSSDHSKPPHTLILPKPGGPLFLSVAASPLIQADANAAINIGLRGIAAPEAIDILHKIRTQTHQDKIHAAKYKHTEKNAREKACYTEGNVINTPSGISRSSKSKGSPNFFYLPDSALPQYNFDIASIQIGSKKHHLVSAVALHTLTDAAVLERIVTINSQRLSSWGIEQHSSPSPAPSADDDPDDQIPI

SEQ ID NO: 3293 - protein, 1408 aa, unidentified
LKGDRLTLWRNHVIFNRGVKSWGEWLLNLRGGLPASLADHKDLLTVAKGDVVQAVKERTAAITPAVIRQEPKFEAATEKKVREEVAARKKKITEAAVARDLLATRRSELRRILALSWLCPETPLQLVPQAAVVAAADDSDREQKVLDRFRQILKQKGVADVAGWLLDCDATLRAAIRPDAVWVDRATCFTKIPKAERPSEDDAAKHLFGLFGSVTEYFATAAAGESEDKNFSTTAGNWVSKNWGEGAKSDDAAIIRALSKLVVIARSSAVGSAGTKLVGRMLAKIGADPSGDFRDLCAAIGWRGKPNKTRIALEKLSATGRVSAALWDRFAEVGAEEIELRKAAKGDEVPAWATAMKSSLPGTVGLPFKPLTGRSHHFEYATMLAFAMRRVSQIHTKAKQAEAERQSFTPEQDRVALVPPAAQRWLDNYVEARTAATGAIDGYQLRRRALGGWSEVAAAWAGCNTSADRIAAVRELQADMEKPGDMQLFEALAADDATCVWRSEDGKWDSSILIDYVRAAVADQTAVRFKVPAYRHPDPLRSPSFIGFGNSQWSIAYSAQAEVRERKKHLERAGKSEKDADRAREALASEPVLQQVALDLWGLGEMRTIEYRWQSTRLLNDLALGSVRDLKGEKVSRATRFGTAGAAGGPFLLNGIDDDATWNGRLQAPRRELEDLARSLDAQDLPYDDETKWPAKLQARLQRVGWFLSHSAKLTPSGPWLDYVAKGLSGGWEWATGRSGSYLFHDDNKARKGRAKLILSRLPGLRVLSVDLGLRTSAAAAVWQVVSRRELNAAREAADSITEADLYCFARSGGRTQVFRRIGPSAWARLDRQFLIRLDGEQSAARPATNDEWNAFQDLRAWLGCLREDKPERLPPVDRLQQQAERLCRLGLRRLADLARVAFLLSAKTRPIMGGRTEPLNGEGQIRAAQDALVLWHSLASSDEFQDLQLRQLWQAHVSDGPPLVGRLTKKQRQEVRDALRPAAERLRGNAAIRGKLSSLWEKRSMEWGKRLRWLRDWVIPRFSKRTKGERVRLARKVGGLSLDRIATIRGVYQVMRAYASRPEPTNLRAGVERLEKAAAQKLRPEFGRRMLAKMERLRENRVKQIASRIVEAALGVGSEDRLHWDKGRKRPTATIADPRFAPCHAVVIENLENYRPDDKRTRRENRGLMNWAARAVHKYLVEGCELHGLYLRQVSPSYTSRQDSRTGSPGLRCNDIPVKELANPEGWIGKLVARAEEAVKEGAATPRQKLLATLAEAARSGEITSSAVRIIAPGGQLFVAADFASPAAQGIHADMNAAANIGLVALLDPDWSAAWWRLPCKTATGEVDETKVGGSDAVPVGKPILDPSAEAGKGYVNAWSDPQEKAVGRRDWVDTKAYWRGIEERVVEILLACNRSGGRARQGKLPF

SEQ ID NO: 3294 - protein, 1010 aa, unidentified
LTDYSLATDAVAKQQRFKVPAYRHPDSLLHPIFCDFGNSRWEIKFAVHEAATKLEAARKRLLKKEADFIAVTKRLVKANTPEKTAIVQADIEDIGKEITQASDDVKWLSTPHGITLGLWNGVTVHRVPKMSWSSKRLAKDLALRQMGARGSLIVATRADRLGRAAAGANKDDLISVLNVFDQANWNGRLQAPRAQFAAIAKHVSKHGWDSKARTMRDRIRWLVTFSAALQSTGPCIDYLSQFDEHSPAKPFVIKKSKKPEEVGTIAIKHADNDKRGTKLILSRLPGLRILSVDLGHRYAAACAVWEAISSEQMVNESKKLNHRAPTSTDLYLHLKCNADPKKSRTTIYRRIGADTIKDSATGKVTTHPAPWARLERQFLIKLPGEQQQPRAASSKDAHGVNELQLVETLAKQIGQVVEDDANKKDRSVHELMARAVRLVALGLKRHARRAKIAYAFDPATKVILGMGASEKEFTEGDSAHICLFADALIEWHSLATDAKWNDKRARNLWNQHVSTIAGGWTIEDPKATDEVRTTSKQRTQSEDSLRLKMAPIAQQLLKINRSAIHNAWKDRWESDNGRAAKIDKATGQKTFDGTGFHASLRWVTDWIMGKNLIGATGDGWKQNVGGLSVTRITTMKALYQLHKAFAMRATPLKPRGAPEKGESNIGIAQSILIAMERMRDQRVKQIASRIAGSALGLGGQWVMRDIPANEKKKRSARTKLVWLEDLSPKYSPCHAVVIENLKNYRPDEMRTRRENSQLMSWASSKVEKYLGEACQLNGLHLRSVSAGYTSRQDSRTGAPGIRCCDVSVKDFQQKPWWRKSVEAAKQKNKEGKGSAFDRYLETLDEQHPKSTSTPSGVQLIRIPVSGGDLFVSADHSSPAAKGLQADLNAAANIGLKALLDPDWQGKWWFVPCASVTNTPVTDKVKGSQVISNVALIPIVQGGTKPARSKVGKKERDVVNIWRDPSSLPIKADGNWFGSIEYWNKVRIRVIDVIQTKNNFAKLTSTQDTPW

SEQ ID NO: 3295 - protein, 1254 aa, unidentified
VLEECSGDSGIQQGGREYLPKLCDSESKATFNYSSEALASGDGKDRVALVLHGDPSEQDLKALASEMDLSWMVKVSPGEFYEGTEAVTRLNQAIDHLAQMIAEPTARLAVSLKDIPRADAEITRMRDSVKSLPEGYRVARNRKAAPDLTFSSIAFMAFPSRLTAACLKLGVKAPAKSAAPRKKKEKIDFAALGDDPVKLARGTRGYVFRAFTALPSWNPSNPGKPSWKEFDIAAFKEALKALNQFRLKTEERENKKKDLEGLIAYQIGSPIKGWKLTKDDSGEEAELPTPLDPDLLKLAWDLEEEMTRGLSDIVVGEKKLLPFGEGHLPIREGGWTVTRASLRGLREIVGDWLKILAKNPEAPTAELEEAVKEHQQKEGKAGSIGSVGLFLTLCHPRYRPLWISTTLEDADNDGDSNRFLHRLADLHDDVGDYLRCQESVNLTPAEPRHSRRAIMFSDLNGRSASKYINADTVEVSIARLSAGNVGELRCRLRFTSPRLRRDGLLDEGWMQPMTRALGLKIDQSEPEPFDSALSLMPDFDSSGSIRFLLNFAANIDAEPLRGALGKASRWDRQFNGTKDKNIHIHWPGTADPAKMKVTPWWAGPAVIAGGFTVLSTDLGQRTAGAWALLRITSSRPETTRPVRLVGHDGTREWFAEVLKTGMHRLPGEDAEVRGKDGRMGQELSGKTGRMASEEEWNEAIELAKALLAEEPENWVGSNRVEKSHPEQNDSLLVLANRRLSRLGTFHRWSCFDPDKETDSARRDSLIAKLTAELDHWEDSDVLSWAAKLAAGDVTAFKAAAGEAFAKYRRDLLPLLVKLANRVAPRRDDLWEWKERGAGSPYGDLVRTPAGEKAKAPIRGQRGLSMARIEQMENLRRLFLRYNRSLDRSPGTPAKFGRADAGRTSGEPCRELLGKIDRIKEQRVDQTAHLILAQALGVKLAPHSLDAATRRSGDHHGEYARISGRSPVDLVVIESLERYLTSQGRAPSENSRLMKWSHRAVRDKVKMLIEEPFGIPVLEVPAAYSSRFCAVTGEPGSRCEERASLDDYLEEMYGRRANTPPTAGHSDMRPWNQKLLGQFDRLAGINAKRIAEGKAPKTLLLPKTGGPLFLGAKESSVVQSDMNAAINLGFRAVASPGALHLLHRVRSQSDGQEITTLVKNAREKAAYGGKGVPITMKGAASPKLSKSANFFHDAKGISRFDSGEITLGGKTIPVASGIGLWHAVNEAFLPRIVALNEERLMRMLPVFDEKDQIPM

SEQ ID NO: 3296 - protein, 1165 aa, unidentified
MNDWQNLYAVRKTINFEFKPSLYTKKRVLDARIKRNSVLIDVKNNTIEIIHLFNTQNQEVANLVQRYLQKLTSDFDILVEKFKNITDGIYINGRYENFRIYVETSKLKLVGKDFRDCYFQMKNERGKSRKGWDYYYQFNAKTNKAEFRHVKFGDFLTVSHLFAFHYDKTTKDGEFQRLLKEKINFFIKKYKCIQIELSDFLDDNNRFEKFISKPEILDRLKRLAYCIGDILSLMNIFCDKGKNGSDGCSVFIKDLGDFRIIALDNDYESVVAEIIRQVNCITNPKAFHFKFTLNFKAKNPNTQLSGNDVFFNEKDLQKKLKEEMDKLENNKKEKSECQSFLSKFDNLAGKDCTDGRWADIKNKQGLPDNYQDAKKEYESCEGKKKELSKEIAYNENEKNNYAVINQLKAAISNSKNTHFGVVIEKEANYYLALENKISNGKLKADNKYVLNNLKNNLFSCKLLKYESLTWKAVEKLCLLPTSSLNGTSKDVVGYWSKFCKGVIILEKKNEKDKRDVFDLGIIKNYLVEIMSKTNISSGFNKEDFDKLVTLDGIKAYFDDYCFENQWIDADWDEFLGLDREGSIDLYQIFNKDFELDEHFAISENDKERIKRIKFAQLILKERFVAKQKNSERIRNLFTIYWQNCFNKFDTEKFRVQPEGRIYIRDMSPVNDAKRYREEKVLGDFGILFNPVAKAIDQSSKDVKDRIGNFNDYLKKQPLKNEIYVVGLDRGENSLVSYTLVKFRKKIVGENDISVRFDSLIGTEAWVLDEMVEVRDLSAVKIFNEKGKWRKSEFVEQKEDYYFVEKNEGNYDEDKNKQDACKKRDELKKMYPDYGDGRERVVVCPIRCKPQTKKEKQQVEMEKTGAYAVKILSWEDEDGAVYNYRVAQEILKEERLSQVEKNRDFELFNTEKFKNGYVSALIGFIGERVETNNAYVSLENLNMGDKTGKGGNYRKTFGASVYQMIENRLMSKLGYSVVKGSSSVHSQKVPKIRKVEELKKDVLSGEKNNKDFQIGVIQITDETNTSQICPNCGYSMNRYGLAKIENGELKLTLNAEELKDKDFGIDISKVTIFRVDDGVFAWRYSGVATEKLDKSHNDFCRVLSKTRQNETKSKDFIRCVHCGFDSRFPTKNHEKLKKVNGGDVLAAYNIAKRGLEFIQCKSEVIN

SEQ ID NO: 3297 - protein, 1128 aa, unidentified
  VARIANT 175: note = X can be any amino acid
  VARIANT 195: note = X can be any amino acid
  VARIANT 213: note = X can be any amino acid
  VARIANT 305: note = X can be any amino acid
  VARIANT 332: note = X can be any amino acid
  VARIANT 355: note = X can be any amino acid
  VARIANT 380: note = X can be any amino acid
  VARIANT 400: note = X can be any amino acid
  VARIANT 493..494: note = X can be any amino acid
  VARIANT 541: note = X can be any amino acid
  VARIANT 637: note = X can be any amino acid
  VARIANT 673: note = X can be any amino acid
  VARIANT 709: note = X can be any amino acid
  VARIANT 721: note = X can be any amino acid
  VARIANT 733: note = X can be any amino acid
  VARIANT 779: note = X can be any amino acid
  VARIANT 785: note = X can be any amino acid
  VARIANT 834: note = X can be any amino acid
  VARIANT 837: note = X can be any amino acid
  VARIANT 868: note = X can be any amino acid
  VARIANT 917: note = X can be any amino acid
  VARIANT 944: note = X can be any amino acid
  VARIANT 962: note = X can be any amino acid
  VARIANT 966: note = X can be any amino acid
  VARIANT 978: note = X can be any amino acid
  VARIANT 1040: note = X can be any amino acid
  VARIANT 1078: note = X can be any amino acid
  VARIANT 1086: note = X can be any amino acid
MEKLTNLYEVIKTIKFELKPSEFTLKRCSFDSSFESDPHVLFEKLKPIHKQQKEILNILSNLPPQKIVIHKNLIKLIDSDYFYRLKSKALSANNTLVVLSKEFQEEFSNYIKEKFDRLHSTNYSLSYLLWADSLEKPSNTDKKPTKSEIAFAVKRYVHAVQKVEEIISNIIYKTXNTDNELKTMLKSYYDNKDLXYIFSIANRYLQSYSPTSXFQVSKFGFNAKAIRKKVDVEKMEKEIRILETKMLDLEDKKVIATQIFDDYTKKFVQEKIKTDPKLVALRENQTASPNERKQAKEYLKTLKEXDFNYQKILKERSKAKKEQKKYEPKFTXDKEYCELKLAKIDASVIYGRAKXDFFAKQQELYSQQALSHYARLVRNXEKYFVVMIDRDNINELDNLXDNQIKNDDYFEILRYSSLTAKAVEKLIFEKNALNFNRYDKEYRDCKNIREKRTYKEKGSEDSRSITNDQKTKLRKLVSFLNEAITQLNKKVEXXVFNWVPFNISNEFDDFAEFRKYVTKTCYITKWESISKQIIYDLDKKXILDFYQIYNKDFAVDPYFAKTERDKNRIKKDISIMGKQNLFTIYWESLFGDNSSNIRLNPESNLYVRPAKVVEEISDHNPNYETSKLRYKENKIIXDFQLVFYPTKELPLDKLQKKILDEVDKSYAIGIDLXENSLATICLIDNEKRVVLDEEGKPIIKDLSMINNKXDFVELDDCYIDXQPYKRKQKLLVXGQGNKPYTLGRYFPEKFQNQVISKMSKETLIEVLKILEDIAPEKLXIVDNHXNKVFDYNYAFEHLKATNKIRYHLQAFDHTNEEMEILEKDLLASTKIRGXFVXKVVSYITQMSKKYNALIVFENLDQEIGRIRXMTLFSEQEYEKVSAKEERMYKGISPYQLIQDKIIQKCNYLLSKQDNTKXIQISPRLKRQEDIKQLTLLKDKNCAWXKVVFVNEENSSKECPECXFIPXKYSSNINIQENXIEIMANKKDKKLLLFENNPLLNERRIAYQSIPDTNELKKKSLLIETRVGKTILTETDMKIVXDPMICVNCGYDTRKEEWVKKYNLKSCDEIAAYIIAKRXLEFVENKXYENQSIDKPSQTNTFEENKKSKNSDNENSSYTMSGNINFSHS

SEQ ID NO: 3298 - protein, 1459 aa, unidentified
MAVKTYKPRIDFKALEREDAEDKQRFRNRADEVLQYLWDTHVAFNEGVNYLAGELLRMRRGPGVWREKKDGIWQEWRLVRDFAALQDARSRKTIAPGDIGLVENTELVSRFQTGSRNESDSVELAVSCSTIFAAICPPAKEDEQGQMPRDDLDLLTVAGSEAKGVRARGKTKTGGEKKTSGKRPRWLLDKAIAEECGACATLDELFGRLRQREEFLSAKKDGEKRVKALGDRFSTVPWPAAQRAILEEAGKWTEKKEKADRKNALEAAPYHRLLEADCLPLPGFQRPRDRLGITECKSEWNYAMWNMAGQRVRSHLGWVRRRSREQLLWHLGKKLFEEGGWIRTKDQGKEIQEKDRRPEHIVFSQPVDDLGDYQQRPAYRKRRWFRQLQGEYEGVEMPRLFAGLSFGARAFPRISNRMLKGWAKIRQKWRKVLTKRPNAAAEELAGQVNLLRKRKPRDFGDQELFKWLARQERRYLWDGSDRKVDNDCGRDDRDCVAAFAVYNERYGELPSSITFTENHPLRHPVWAFFGENSAVKYKLRCEEVTDGEGRSQKMLYVLLDQLFCRNPDGKGYTVVSDVRVPLKGYRDFAESFDLSGGREIASTDELEFRDDLLAGDPLKAKLGGIKLIWDRGDFPRNAKKVPVRAPTRRVYVSFSCDVTEKQPPAWLAARGSEVAAIGSQPRDGVKGLLELRRSIRWKEDVEGGKKNDSVLLLPSKRAWPDVAVQKKLKVLSVDLGQRHGAGTALWEVNAAETTDSLDWEIGQTRSGTCVRAALIDKGMISLPGDDEALPAAEEQLRNRLRRLRSRLNLQRMLLQVARLLSLEQFEKREFGKERKRHRRGGFDGPCGRRSVTRIEALKEDDIRGNCEKAAQLLLNWASTDAMQESLRSLGHDGDLWSYLADKDPRLKNVANALPRTTVPSEKEARDSSLDRDSLKAQRGIEDKTFYDSVKQHRSALARTLCDGYDAALRKRATAGLWAELDHVLVREVSYSDQPEKEKPRELFTATGLLPLLRRPPAKKHEAVVDQNRLPLGKTFRGGLSMQRLNFLEELRSFVRKWSCRPRWPGDVRRLSREQAFGVQDTRHLNHRREHRVKLVAHCIVARALGFEQDIRRGIWRYQDAGTGELLWHHPESRRFFREREDGTLQQIGVPPGLTDQEKSHPHPVHPPAHLIVLENLWRYGFKRDRPSNENSGLMMWSHRQLLKFIKHIGGLFGLPLAVAYAAYSSRFCSSCGTPGFRASRFDPKWLDQEWMRRIRASNDIQDHAMKKVANKVKARLDEEPTAYEKVQDRPWIVREGGTHFVCANRHCPVHTEPIDADENAAANIGLRFLRGVEDFRTRVTPDGRLVKKLSYSIVERLDLVKSDGGDFWRQPSGERAETKSPRRKRPEQGAAAEEDLSEEDDEGSSIGVLRDPTGKALPSDDWYEEGVFWGHVAGQVAAGIKAANADAFAPADENNDPTA

SEQ ID NO: 3299 - protein, 1649 aa, unidentified
MNELYRTYEVLVEETVPGDYEKRLKGKTDKTLRWNAEIDGALRDTHMIFQDAVCYYTLCLAGLAGNERHKDGAMASKPLNPLYGHLTGALKQQTEAVIRRLAANYRPLANISTIEAFFQQAYSWPEKPDDLKQLLPAAYGLLESYGMDYAEQDGKTTNVPKECKPIKNFRNDHFGRLHDPVSGKADTSRDKTVENYFAKVKSQLAPVENIPNEQTLAESLDLGFCFKSPKREVAGLLALYDYLAAFGIRNPQKTPSTIGKLQPSAGESESDRKKHAEYYDCIRQMKDRLLKEYGEYPSMKKDTPKEQKKAIRAKQQAWIKNAKLKAQTFSLKSYAGKKPNKRLWYCLRYKFCAHASVRLALYEEIKKLEPQTVDTSKPDVFNRWRQLIGQGKAPIPAFTSLLGEGCIDPEFDKSAFAAAAEDLFKYKIRTRAREEKVRKVLKIVQAHEAKGEQSLEADDSPTGKKVTIHGMADDPRWKAEDNERAGIESLLKELRGEKKLDEYGLRDGTIGGWPEVRKALLQVHKVAVKEGWEKSKMSKQLEIEVDREMEGNRQGFGSADFFHALCDPAYHHLWLNISEHDHAGINDFIPHYVRYAEWREELIDLLIDEDGHAIEQAQDLTTPEIEKLAKKPISYTWPGLLNRHKKPSYRYFDFTAPLQANLQLKSLFRRVTHARGGIPVYKRQTGDDAKLTLAARRLKRDKIMNGDGSVDALWCPPLVLEGMAKPTTTDRPRAGKYDDPRRKTWPRKDIEASFSLMAKPLPDDEWNKVAGVPSSAKKQPVHLTISIPIEGDELTKLHTEGVHFVGGSLKGVDENDDKRKYFRWPVDIETDKIASKEAAERVRKGDGKTKTQSKKQDVKPEELWCHSKGGFRAKESRYSKAEQTKVVSDFHVLSVDLGNRFAAGFARQRIHADANLTGRVISAEGSNPIIKAEVTRTGTLRLQGEDAKIWQHAMDTEGHCLKDAQDNYIYEFKKEPYGNEGRGRFPDEAEYEKFKMLAMRLVDVKSLSLEGTEKMTYSELGDHLVFRLKRRIGRLRTLFNLVWRVCGDKEKDKKGKYSIPRDPNLRDFHQRAVVEALARSAFPKRERQPGEAEDKDDESLRLALATPEQWKQIKDSKLLDSAKGAEEKTRRAELEKVIRNTQNWKWGEFPKAVKAQITEYCAGSDSIDKLLVGVIESCLPLRGRHWRWSREKVSPMQRNGERLYMGPDGEDKSHVPKILGMRGLSMKRLEQLLNLRQRCQSFAKLENRFHTQFLKDDFNPPDSVPRDEVDDVCPLLLDRSNRLREQRVYQTAHLILAEALGMKSKNPAEVNNKKARRVEVDLHGEYERRKDKDGNIFPRCSVIVLENLERYKTSQERTRTENSRLMKWAHRAIVEKLEDMCKPFGITIMLVDPAFSSRFDSFTGLPGVRVNSVSRGFDKQYPYNKWVNDKTKKGDDTQLARDIKSLVKLFESNQQYKDTLLLAVEGGKEFLSVRGSNKDIQNADINAAVNIGLRAVADPRRFDIFPRLRTKQLADGKVQVLNWRGVFGQFGKGDERRRLVASPLLKAAVQSDTSDPDTAKKMKKQKKGQGQTEPTEPDNDAESSTQSSEFPPFFVQAVEFAGMPQDEAFEAESNELPAIRAFSQGLFLKRVECLCNERIQQINFDRVKK

SEQ ID NO: 3300 - protein, 1116 aa, unidentified
VRFELKPSKETLVILNQEKIFEPPNFQSKIFIKNNTEKIEAEKKVKNYQFCINFNTLKDLIKECDKKFQKAKDIQNYLEKNPKILWSVWIDPEKIKIIDKDLKYKLQEKKNWKKEFWNEIIKKKSSYQVQWKKGSLFTLDDIDAYFEKIRSAQNSERKAGKFTIQVLEKISYLLHQYEIRKKQILLENNLQDISFLKKKELVARIRSFFGMFLNLERTFSLFVPEYSTEKAKFDPDLKDIFDEYKNDLEKIIQEIEIIFKESDLYLHNNVQRRFSFNIRAINPNPESTDKTENQKITEETILKKIEEIENEILKLKNQKATLKGERKEKGQLHKNDEWNKILKQLNPSNKEGMFSKLSELRRDLEEVKITHYAVLIEKEENFFLVMENKKKQDNSIKKINEFSLLNLPNGNTCKVLMYNFLTFKALRRLCLEEKSSMKTENFLNISNTSWKEQVGNGKRLREVNRDWKKVEYFENLKKYLIFITKNNAQKIGVSFTEFQYQEWMNCKTLEELENLIDKQGYQAKWKDISWEELLKKDKIEIFQIFNKDFLLEEDFATSEKDKEKIERLKKAKKILGKNFISKQQKQNRKKDLFTIYWNNFIKDVNSEEWRIRPEGKFYVRLKDDISETQRLVGSDEKTNKARFFENKIFADFGLGINSTIDTVGSKAKKKEEVEKHIQIMNELHKNDSQDFYILGLDRGLNSLVSYCLLDSNLRIIKTDSEKNLYEETDPEYQLKKDFVCGDWSLVNSKGKFIKREECKFNNNNDLKAFWINVFGKLKMYYEFEKNNGFDIEKYVSQFNENKKGDKFLEFGNEKNKIRLYILKEKNDKGKTFETKFVKKEIQQGEDNRPLKNENNENIFKEIEENIWIVDSDENKVFDYVLSFYIEKAKRIFTLYKQQTLDSSIQYTEKDLEELLFESQDDLKEGFTNFVVGEIVELTQKIADTKKKKLYITLEDLSNYGNNKDFTQNIDNKSFKEEEHERNLSVIIYQKLENNLVKKFNYLKSKKDDSKINKTQFSPKIKRIIDINKFQEKNQLGNLIFIDPTNTSKQCPVCEHIENKNREKKNPLLDYILCQNNNCNFSTKENVDKKGFDFIDGGDTLAAYNIAKRGLQYIQSL

SEQ ID NO: 3301 - protein, 1157 aa, unidentified
MQKDTLTVQVKVLPENDEEALKIYNHYQINNKVRAFYEFTFRSLLKGIIFTVENGIFIKKRLSEESTLKLKEYLLVNLKRDPAKMYFPCLIDLNIKNSWRKGGGQTHNNLKIYFINSLYDKYKEEFYPQQKEIPIDEVIKTLINKLEEKELSIDAAFHCQKIKDTATKKENKHKKFNEELEIIKKIFNEDIITEQKKYIQRCFDIYADKILNPMIIIDEEVKSLELNSYILPLSELSKLNSEHEFYIAPEFLQIYDNANNWNDYPSLLKAYSKSSFATQTIGKISSHNSWKQTRKEKREEVQAEKEKFENKWKDTNWFKLLEQYEEKRTQQEKEANSKSRDFFITTRVIKGLGSPSTPKLIFSLWNKESTNKPVDEKRAIEIVDKYQSANNKDIGDRPFINWLAAKPELWWNQNPEASNLIQETQQYPVELWVKKYTKVRLDFLKASRAMRFQYINPEHPQWPVWNMDGDDAHWKWAQTKGKNYIILESPFVGDILLKVQYDPECDIKRFLENNNKRPERFLIDFDSNNKVPVFKLKDAKTRRHDYFEFKPSRLTIINEVAKENFSNQEALKNDWYAYIVLNQNESAPARLNFGFLANKYRVKNDKLVYYSLDDNEFRNFISLSPSDKLNQYVLPDDIEMAIEDGARIMSVDLGMRDDAIVSIWGITEKSNNKHYESKLSYDIPGVDNFQAVHITSSVLNIPYKYSPLNKEIREKWIIFQQELKEFLLQNEEKAKYIADWWNDPAVKSPRRWIDLFASSIEASLKILNERKALRYKKNLEGVKTRYDETTRLLKECTDFINLCLYKKGKFAHLGGLNLKRIEALERLNILKRRLNTEPDLENPDKIIHLTENFAKDFKKHLKNLRDERAKQLAALIVKEALGVNPESKHLPVQVIIFENLKTYSQRDFRDRGENKKLSLWSHRNVVNYTTAFARDYGILVQDIYAIFSSQTCSFCGAPGKRVHQTRNGYRVIRGGKLFQCSNSNCERYQRNPVNADINAAQVLAKRFLSQLVFEPVTLKPEIPEEATSFDIELERRKKKHKYSLRPKAIGYYTVYVNDAISDKELEREGKLILEILKESEKEEFDLLTSELETEEAEATKTKSKSKKKTRKTRKTLMHDTTGNILSGYWLEAADFHKIVQMLVNKRLKELNTEKVPI

SEQ ID NO: 3302 - protein, 1337 aa, unidentified
MAKEIREFVDSAGIESDRVKAHYKTAFTVAKKLKSEETVWAKSKKAKKLLPLIENQHTLSVLDLKLKLWHFASIDSDIEKAPESDKRFVWLHKTGPINPMAWLLARFLWLQKDESLAKVALEDLVAFIKKPGKKIPKPVGGDLQSMPSKFNYFTHWLGINFESPAFREKFDDAALSMAFEDVFKYKLRTQKREEQRMALSKILAAYEGDGGTIEADDSPTGKDLVIRGMKGDPRWKGDKSAGKKGIVDLLADLAKDKGFDNYGLRSGTIGGWADLRKAFLKLEKKAKDANRSLTYDELENAVEDEKRENRQGFGSDDVFKKLCQSQYHDLWSASAESIGIEDFISHFTRYSEWVEESEAICELDDQGTIARDANGDPKPKPISYTFPGEKNRHGKTSYRHFDFKHQLNRQMTLNLFRKKCETNDVAYELVEESVTLSARRLKRDKVMTAEGTSVEALWCPPLVLGEVKPRAGKTKKGKGGKREWPDGDLNVSFSLMVADEKPGEPKPPVHLKVAIPLEWNEQKKLQEGVLRWEKGSLRGYAKKGDPDADKRRHFKWPVDLQTQTNGAATSLDDDEEGVTARKLWCGDGKHPLQGFRVKAEQGSTVPELHILSVDLGTRFSSAFARLRIHCGPDGKGRLISPDDFTPAIRAHMYRKGTLRLQGENAQVWDHCRDKAGNCVKNAAGQYVYAKQDELYGNDGRGRYPLVKPEEGIDEIAAFKKFADQIVPITSFSIIGTETMTYPEMGDHLIMRMRRRVSRLRSLFNLRWRVVGKTEWRAGKSEPRKPEQQKEHRRAVIELLGGLAFPKTPRLEGEEELQDNRRLRDALNADPKAWEAIKADLEARKEPAKESQRCQRLDATIEKWNWESLAKELDQQLKNYFADGSGTADLLIGVLEHCLPLRKRHWHWNSAEHRLYMDKTETCPQHIPFIKGMRGLSIRRLEQVLRLRQLFQSYAKLEKRHILGEKGIEPTPTKRGDNVDDPCPDLLEKSNELREQRVNQAAHLILAEALGLELKNPAEVDNKKQQKNEVDLHGEYKPILDPKTNKPIPRCSVIVLEDLTRYRTSQDRTRGENSRLMQWAHRAIIKKLTDITKPFGITLMLVDPAFSSRFDSRIGLPGIRVNSVSRGFHEEMPYAAWAKQKGKDGKPSDLANKVALLKEMFDQHQNFKGQLLIALDGGKQFLPVPADASELKKDFCPPNADENAAINIGLRAVAHPDRWDIFPCLRSKELSEDAVQIRNRRGSFATFADGHPRKALRKQGANQAAASSAQNAEPDEELLPDFFVNACNFPGLPQGEAFEPHPETGFNFAAFRRGLFLKRVQQLCDERVAAINEQRLNK

SEQ ID NO: 3303 - DNA, 26 bp, unidentified
  source 1..26: mol_type = other DNA
atctacaacagtagaaattattagga

SEQ ID NO: 3304 - DNA, 36 bp, unidentified
  source 1..36: mol_type = other DNA
atctacaatagtagaaattaaaaaggggtattagac

SEQ ID NO: 3305 - DNA, 36 bp, unidentified
  source 1..36: mol_type = other DNA
atctacaacagtagaaattattgggtcggtttagac

SEQ ID NO: 3306 - DNA, 36 bp, unidentified
  source 1..36: mol_type = other DNA
atctacaacagtagaaatttattggcgcctttagac

SEQ ID NO: 3307 - DNA, 36 bp, unidentified
  source 1..36: mol_type = other DNA
atctacaaaagtagaaattttttgggtgttttaaag

SEQ ID NO: 3308 - DNA, 36 bp, unidentified
  source 1..36: mol_type = other DNA
atttaaagcacccaaaaaatttctacttttgtagat

SEQ ID NO: 3309 - DNA, 37 bp, unidentified
  source 1..37: mol_type = other DNA
aatctacaacagtagaaatttattggtgcctttagac

SEQ ID NO: 3310 - DNA, 36 bp, unidentified
  source 1..36: mol_type = other DNA
atctacaaaagtagaaatttgttgggggttttagag

SEQ ID NO: 3311 - DNA, 36 bp, unidentified
  source 1..36: mol_type = other DNA
atttaaagccaccaataaatttctacttttgtagat

SEQ ID NO: 3312 - DNA, 36 bp, unidentified
  source 1..36: mol_type = other DNA
atctacaatagtagaaatcttataggcactatagac

SEQ ID NO: 3313 - DNA, 36 bp, unidentified
  source 1..36: mol_type = other DNA
atctacaaaagtagaaattttataatgttattcaat

SEQ ID NO: 3314 - DNA, 36 bp, unidentified
  source 1..36: mol_type = other DNA
ctttagaaattatataagatttctacttttgtagat

SEQ ID NO: 3315 - DNA, 37 bp, unidentified
  source 1..37: mol_type = other DNA
gtttagaaactatataagatttctgcttttgcagatt

SEQ ID NO: 3316 - DNA, 36 bp, unidentified
  source 1..36: mol_type = other DNA
gtttagaaactatataagatttctgcttttgcagat

SEQ ID NO: 3317 - DNA, 36 bp, unidentified
  source 1..36: mol_type = other DNA
atctacaaaagtagaaattttatattatatttaaat

SEQ ID NO: 3318 - skipped

SEQ ID NO: 3319 - DNA, 35 bp, unidentified
  source 1..35: mol_type = other DNA
ataaagaaaaagctcaaaacattgagcatcgaaac

SEQ ID NO: 3320 - DNA, 36 bp, unidentified
  source 1..36: mol_type = other DNA
gtttagaacttatataagatttctacttttgtagat

SEQ ID NO: 3321 - DNA, 36 bp, unidentified; identical to SEQ ID NO: 1679
  source 1..36: mol_type = other DNA

SEQ ID NO: 3322 - DNA, 36 bp, unidentified; identical to SEQ ID NO: 1873
  source 1..36: mol_type = other DNA

SEQ ID NO: 3323 - DNA, 36 bp, unidentified; identical to SEQ ID NO: 1873
  source 1..36: mol_type = other DNA

SEQ ID NO: 3324 - DNA, 27 bp, unidentified
  source 1..27: mol_type = other DNA
agtagaaattataagggtttattaaac

SEQ ID NO: 3325 - DNA, 36 bp, unidentified
  source 1..36: mol_type = other DNA
gtctagaacgcataaaagatttctactattgtagat

SEQ ID NO: 3326 - DNA, 36 bp, unidentified; identical to SEQ ID NO: 3312
  source 1..36: mol_type = other DNA

SEQ ID NO: 3327 - DNA, 36 bp, unidentified
  source 1..36: mol_type = other DNA
atctacaacagtagaaatcttatggtggctttagag

SEQ ID NO: 3328 - DNA, 36 bp, unidentified
  source 1..36: mol_type = other DNA
atctacaatagtagaaatattatatgaattttaaac

SEQ ID NO: 3329 - DNA, 36 bp, unidentified
  source 1..36: mol_type = other DNA
atctacaagagtagaaattcagagaggcttatagcc

SEQ ID NO: 3330 - DNA, 36 bp, unidentified; identical to SEQ ID NO: 1811
  source 1..36: mol_type = other DNA

SEQ ID NO: 3331 - DNA, 38 bp, unidentified
  source 1..38: mol_type = other DNA
atttaaaaccgataataaatttctacttttgtagatat

SEQ ID NO: 3332 - DNA, 36 bp, unidentified
  source 1..36: mol_type = other DNA
atctacaatagtagaaattatatagggctattaaac

SEQ ID NO: 3333 - DNA, 36 bp, unidentified
  source 1..36: mol_type = other DNA
gtttgagaatagtgtaaatctataaggtagtaaaac

SEQ ID NO: 3334 - DNA, 29 bp, unidentified
  source 1..29: mol_type = other DNA
tttaaaatccagtttggatagatttatag

SEQ ID NO: 3335 - DNA, 36 bp, unidentified; identical to SEQ ID NO: 2078
  source 1..36: mol_type = other DNA

SEQ ID NO: 3336 - DNA, 36 bp, unidentified; identical to SEQ ID NO: 1811
  source 1..36: mol_type = other DNA

SEQ ID NO: 3337 - DNA, 36 bp, unidentified
  source 1..36: mol_type = other DNA
gttttaataccttatgaaattacactactctcaaac

SEQ ID NO: 3338 - DNA, 36 bp, unidentified; identical to SEQ ID NO: 2078
  source 1..36: mol_type = other DNA

SEQ ID NO: 3339 - DNA, 36 bp, unidentified
  source 1..36: mol_type = other DNA
atctacacacagtagaaattatttaggttacttaac

SEQ ID NO: 3340 - DNA, 36 bp, unidentified; identical to SEQ ID NO: 2532
  source 1..36: mol_type = other DNA

SEQ ID NO: 3341 - DNA, 32 bp, unidentified
  source 1..32: mol_type = other DNA
atctacaacaatagaaattattctatattact

SEQ ID NO: 3342 - DNA, 36 bp, unidentified; identical to SEQ ID NO: 1618
  source 1..36: mol_type = other DNA

SEQ ID NO: 3343 - DNA, 36 bp, unidentified
  source 1..36: mol_type = other DNA
gttttactaccttatagatttacactattctcaaac

SEQ ID NO: 3344 - DNA, 36 bp, unidentified
  source 1..36: mol_type = other DNA
atctacaatagtagaaattattgaagcattctagcc

SEQ ID NO: 3345 - DNA, 36 bp, unidentified; identical to SEQ ID NO: 1718
  source 1..36: mol_type = other DNA

SEQ ID NO: 3346 - DNA, 36 bp, unidentified; identical to SEQ ID NO: 2103
  source 1..36: mol_type = other DNA

SEQ ID NO: 3347 - DNA, 37 bp, unidentified
  source 1..37: mol_type = other DNA
atctacactagtagaaattttttcttattatttaacc

SEQ ID NO: 3348 - DNA, 36 bp, unidentified; identical to SEQ ID NO: 1678
  source 1..36: mol_type = other DNA

SEQ ID NO: 3349 - DNA, 36 bp, unidentified; identical to SEQ ID NO: 1678
  source 1..36: mol_type = other DNA

SEQ ID NO: 3350 - DNA, 36 bp, unidentified; identical to SEQ ID NO: 1655
  source 1..36: mol_type = other DNA

SEQ ID NO: 3351 - DNA, 36 bp, unidentified; identical to SEQ ID NO: 2078
  source 1..36: mol_type = other DNA

SEQ ID NO: 3352 - DNA, 36 bp, unidentified; identical to SEQ ID NO: 3011
  source 1..36: mol_type = other DNA

SEQ ID NO: 3353 - DNA, 36 bp, unidentified
  source 1..36: mol_type = other DNA
gtgtcagtcgatcattggcgcgctggcctgcgcgcc

SEQ ID NO: 3354 - DNA, 36 bp, unidentified
  source 1..36: mol_type = other DNA
atctacaacagtagaaatttatatggccagttaaac

SEQ ID NO: 3355 - DNA, 36 bp, unidentified
  source 1..36: mol_type = other DNA
atctacaacagtagaaatttctatgagcttttaaac

SEQ ID NO: 3356 - DNA, 36 bp, unidentified
  source 1..36: mol_type = other DNA
atctacaaaagtagaaattcgataggagtttctgag

SEQ ID NO: 3357 - DNA, 36 bp, unidentified
  source 1..36: mol_type = other DNA
gtctccgccgctggatttcaaatcaggttgaggcgg

SEQ ID NO: 3358 - DNA, 37 bp, unidentified
  source 1..37: mol_type = other DNA
gccgcctcaacctgatttgaaatccagcggcggagac

SEQ ID NO: 3359 - DNA, 36 bp, unidentified
  source 1..36: mol_type = other DNA
ctcgcagcggctgaggggactgggatcgactgacgc

SEQ ID NO: 3360 - DNA, 36 bp, unidentified
  source 1..36: mol_type = other DNA
gtcgcagcgggtccgagaaccgggatcggctgacgc

SEQ ID NO: 3361 - DNA, 36 bp, unidentified
  source 1..36: mol_type = other DNA
ccgcctcaagctctcctgaatcgtggcgactgatgc

SEQ ID NO: 3362 - DNA, 36 bp, unidentified
  source 1..36: mol_type = other DNA
ccgcctcttcattcgtttccccccggacgcagcggg

SEQ ID NO: 3363 - DNA, 36 bp, unidentified
  source 1..36: mol_type = other DNA
gtcgcagcgggtcagagggccgggatcggctgacgc

SEQ ID NO: 3364 - DNA, 36 bp, unidentified
  source 1..36: mol_type = other DNA
gcgtcagtcgaccccagtcccctcagccgctgcgag

SEQ ID NO: 3365 - DNA, 36 bp, unidentified
  source 1..36: mol_type = other DNA
ccgcctcaggctctttgaaacagcggcgactgcggc

SEQ ID NO: 3366 - DNA, 36 bp, unidentified
  source 1..36: mol_type = other DNA
ccgccacaagcactctgaaatcgcggggactgcggt

SEQ ID NO: 3367 - DNA, 36 bp, unidentified
  source 1..36: mol_type = other DNA
atctacaacagtagaaattatatgcggtcattagac

SEQ ID NO: 3368 - DNA, 36 bp, unidentified; identical to SEQ ID NO: 1772
  source 1..36: mol_type = other DNA

SEQ ID NO: 3369 - DNA, 36 bp, unidentified
  source 1..36: mol_type = other DNA
ccgcctcagtctccttgaaacagcggcgactgcggc

SEQ ID NO: 3370 - DNA, 36 bp, unidentified
  source 1..36: mol_type = other DNA
ccgcctctcgatcgcgttgttcacatcgtctgcggg

SEQ ID NO: 3371 - DNA, 36 bp, unidentified; identical to SEQ ID NO: 3363
  source 1..36: mol_type = other DNA

SEQ ID NO: 3372 - DNA, 36 bp, unidentified; identical to SEQ ID NO: 3363
  source 1..36: mol_type = other DNA

SEQ ID NO: 3373 - DNA, 36 bp, unidentified; identical to SEQ ID NO: 3366
  source 1..36: mol_type = other DNA

SEQ ID NO: 3374 - DNA, 36 bp, unidentified; identical to SEQ ID NO: 1772
  source 1..36: mol_type = other DNA

SEQ ID NO: 3375 - DNA, 36 bp, unidentified
  source 1..36: mol_type = other DNA
ccgccacaatctctttgaattcacggttactgcgac

SEQ ID NO: 3376 - DNA, 36 bp, unidentified
  source 1..36: mol_type = other DNA
gtcgcagtacccgtgactccaaagagattgaggcgg

SEQ ID NO: 3377 - DNA, 36 bp, unidentified; identical to SEQ ID NO: 3365
  source 1..36: mol_type = other DNA

SEQ ID NO: 3378 - DNA, 36 bp, unidentified
  source 1..36: mol_type = other DNA
gccgcagtcgccgctgtttcaaagagcctgaggcgg

SEQ ID NO: 3379 - DNA, 36 bp, unidentified
  source 1..36: mol_type = other DNA
gtcgcagcacccgtgattccaaagagtttgaggcgg

SEQ ID NO: 3380 - DNA, 36 bp, unidentified; identical to SEQ ID NO: 3378
  source 1..36: mol_type = other DNA

SEQ ID NO: 3381 - DNA, 30 bp, unidentified
  source 1..30: mol_type = other DNA
ttcagcactactgacatcagcgagtagaac

SEQ ID NO: 3382 - DNA, 36 bp, unidentified
  source 1..36: mol_type = other DNA
gttctactcgctgatgtcagtagtgctgaatggcgg

SEQ ID NO: 3383 - DNA, 36 bp, unidentified; identical to SEQ ID NO: 2305
  source 1..36: mol_type = other DNA

SEQ ID NO: 3384 - DNA, 36 bp, unidentified; identical to SEQ ID NO: 3013
  source 1..36: mol_type = other DNA

SEQ ID NO: 3385 - DNA, 36 bp, unidentified
  source 1..36: mol_type = other DNA
gccaattaaggcttttaaatttctactattgtagat

SEQ ID NO: 3386 - DNA, 36 bp, unidentified
  source 1..36: mol_type = other DNA
atctacaacagtagaaatttaatattgtattagact

SEQ ID NO: 3387 - DNA, 36 bp, unidentified
  source 1..36: mol_type = other DNA
gttttgctcacccattaaatttctactgttgtagat

SEQ ID NO: 3388 - DNA, 36 bp, unidentified
  source 1..36: mol_type = other DNA
gtctaatccgtatatccaatttctacttttgtagat

SEQ ID NO: 3389 - DNA, 36 bp, unidentified
  source 1..36: mol_type = other DNA
atctacaatagtagaaatttaaaagagcttttaaac

SEQ ID NO: 3390 - DNA, 36 bp, unidentified
  source 1..36: mol_type = other DNA
gtgtccatccatcagggacgcgtcggcctccgcggc

SEQ ID NO: 3391 - DNA, 35 bp, unidentified
  source 1..35: mol_type = other DNA
ctcaaaaaaacatcttaatttctacttgtgtagat

SEQ ID NO: 3392 - DNA, 28 bp, unidentified
  source 1..28: mol_type = other DNA
gtcttccccacgcgcgtgggggtgaacc

SEQ ID NO: 3393 - DNA, 36 bp, unidentified
  source 1..36: mol_type = other DNA
gtcacacaagtcggcaccgaagtgatcgactgacac

SEQ ID NO: 3394 - DNA, 36 bp, unidentified
  source 1..36: mol_type = other DNA
gtgtccgtcgatcttcttcgtcgcgacgcctgcgct

SEQ ID NO: 3395 - DNA, 38 bp, unidentified
  source 1..38: mol_type = other DNA
ccgcgtcagccgaccccagctctcggacccgctgcgac

SEQ ID NO: 3396 - DNA, 36 bp, unidentified
  source 1..36: mol_type = other DNA
accgcagtccccgcgatttcagagtgcttgtggcgg

SEQ ID NO: 3397 - DNA, 36 bp, unidentified
  source 1..36: mol_type = other DNA
gcgtcagccgaccccagctctcggacccgctgcgac

SEQ ID NO: 3398 - DNA, 28 bp, unidentified
  source 1..28: mol_type = other DNA
gtgtccattgatcatcgccgcgtcggcc

SEQ ID NO: 3399 - DNA, 36 bp, unidentified; identical to SEQ ID NO: 3369
  source 1..36: mol_type = other DNA

SEQ ID NO: 3400 - DNA, 36 bp, unidentified; identical to SEQ ID NO: 2619
  source 1..36: mol_type = other DNA

SEQ ID NO: 3401 - DNA, 37 bp, unidentified
  source 1..37: mol_type = other DNA
gatctacaatagtagaaattttttatgttttctaaat

SEQ ID NO: 3402 - DNA, 36 bp, unidentified
  source 1..36: mol_type = other DNA
gtagggccgccaaacgcaaaggcgattatccgacag

SEQ ID NO: 3403 - DNA, 37 bp, unidentified
  source 1..37: mol_type = other DNA
cccgcctcaagctctctgaattcgcgccgtctgcggc

SEQ ID NO: 3404 - DNA, 36 bp, unidentified; identical to SEQ ID NO: 3356
  source 1..36: mol_type = other DNA

SEQ ID NO: 3405 - DNA, 36 bp, unidentified
  source 1..36: mol_type = other DNA
ctctgaaccttgaaataagaagaataaagctggcag

SEQ ID NO: 3406 - DNA, 36 bp, unidentified
  source 1..36: mol_type = other DNA
gtttcagtcggcgcgaattccagaatcgtgaggcgg

SEQ ID NO: 3407 - protein, 4 aa, synthetic construct
  VARIANT 3: note = replace with R
KRKR

SEQ ID NO: 3408 - protein, 4 aa, synthetic construct
  VARIANT 2: note = replace with R
KKRK

SEQ ID NO: 3409 - protein, 7 aa, synthetic construct
  VARIANT 1: note = replace with R
  VARIANT 2..3: note = X can be any amino acid
  VARIANT 6: note = X can be any amino acid except D or E
  VARIANT 7: note = replace with R
PXXKRXK

SEQ ID NO: 3410 - protein, 8 aa, synthetic construct
  VARIANT 3: note = X can be any amino acid
  VARIANT 4: note = W or F or Y
  VARIANT 5..6: note = X can be any amino acid
KRXXXXAF

SEQ ID NO: 3411 - protein, 7 aa, synthetic construct
  VARIANT 1: note = replace with P
  VARIANT 2..3: note = X can be any amino acid
  VARIANT 6: note = replace with R
  VARIANT 7: note = X can be any amino acid except D or E
RXXKRKX

SEQ ID NO: 3412 - protein, 6 aa, synthetic construct
  VARIANT 5: note = K or R
  VARIANT 6: note = W or F or Y
LGKRXX

SEQ ID NO: 3413 - protein, 15 aa, synthetic construct
  VARIANT 3..14: note = X can be any amino acid
  VARIANT 3..14: note = Up to 2 copies of X can be deleted
  VARIANT 14..15: note = replace with R
KRXXXXXXXXXXKKK

SEQ ID NO: 3414 - protein, 18 aa, synthetic construct
  VARIANT 3..14: note = X can be any amino acid
  VARIANT 3..14: note = Up to 2 copies of X can be deleted
  VARIANT 16: note = replace with R
  VARIANT 17: note = X can be any amino acid
  VARIANT 18: note = replace with R
KRXXXXXXXXXXXXKKXK
